United States Patent Application Publication US 2022/0213167 A1 - sequence listing, part 37

SEQ ID NO: 786940 - protein, 14 aa, Homo sapiens
  CDR3 for beta chain variable domain of TCR clone 393470 (TRBV6-1, TRBJ1-2)
CASSTGWPPTGYAF

SEQ ID NO: 786941 - protein, 13 aa, Homo sapiens
  CDR3 for alpha chain variable domain of TCR clone 393471 (TRAV12-2, TRAJ47)
CAVFMEYGNKLVF

SEQ ID NO: 786942 - protein, 14 aa, Homo sapiens
  CDR3 for beta chain variable domain of TCR clone 393471 (TRBV4-1, TRBJ1-5)
CASSQRLTNQPQHF

SEQ ID NO: 786943 - protein, 14 aa, Homo sapiens
  CDR3 for alpha chain variable domain of TCR clone 393472 (TRAV1-2, TRAJ8)
CAVREDTGFQKLVF

SEQ ID NO: 786944 - protein, 12 aa, Homo sapiens
  CDR3 for beta chain variable domain of TCR clone 393472 (TRBV7-8, TRBJ1-1)
CASGTATTEAFF

SEQ ID NO: 786945 - protein, 11 aa, Homo sapiens
  CDR3 for alpha chain variable domain of TCR clone 393473 (TRAV2, TRAJ13)
CAPVGYQKVTF

SEQ ID NO: 786946 - protein, 13 aa, Homo sapiens
  CDR3 for beta chain variable domain of TCR clone 393473 (TRBV27, TRBJ1-4)
CASSLMGDEKLFF

SEQ ID NO: 786947 - protein, 12 aa, Homo sapiens
  CDR3 for alpha chain variable domain of TCR clone 393474 (TRAV12-1, TRAJ40)
CVVYSGTYKYIF

SEQ ID NO: 786948 - protein, 14 aa, Homo sapiens
  CDR3 for beta chain variable domain of TCR clone 393474 (TRBV5-4, TRBJ1-1)
CASSLDSRRDEAFF

SEQ ID NO: 786949 - protein, 12 aa, Homo sapiens
  CDR3 for alpha chain variable domain of TCR clone 393475 (TRAV20, TRAJ56)
CAVTGANSKLTF

SEQ ID NO: 786950 - protein, 13 aa, Homo sapiens
  CDR3 for beta chain variable domain of TCR clone 393475 (TRBV29-1, TRBJ2-1)
CSVEGGRVNEQFF

SEQ ID NO: 786951 - protein, 13 aa, Homo sapiens
  CDR3 for alpha chain variable domain of TCR clone 393476 (TRAV13-1, TRAJ49)
CAAMLYTGNQFYF

SEQ ID NO: 786952 - protein, 15 aa, Homo sapiens
  CDR3 for beta chain variable domain of TCR clone 393476 (TRBV12-4, TRBJ1-5)
CASTRGSGFWQPQHF

SEQ ID NO: 786953 - protein, 18 aa, Homo sapiens
  CDR3 for alpha chain variable domain of TCR clone 393477 (TRAV21, TRAJ53)
CCEGGGENSGGSNYKLTF

SEQ ID NO: 786954 - protein, 13 aa, Homo sapiens
  CDR3 for beta chain variable domain of TCR clone 393477 (TRBV9, TRBJ2-1)
CASSPSGGSEQFF

SEQ ID NO: 786955 - protein, 16 aa, Homo sapiens
  CDR3 for alpha chain variable domain of TCR clone 393478 (TRAV3, TRAJ21)
CAVRDIERGNFNKFYF

SEQ ID NO: 786956 - protein, 16 aa, Homo sapiens
  CDR3 for beta chain variable domain of TCR clone 393478 (TRBV12-4, TRBJ1-5)
CASSRPVGGSNQPQHS

SEQ ID NO: 786957 - protein, 13 aa, Homo sapiens
  CDR3 for alpha chain variable domain of TCR clone 393479 (TRAV1-2, TRAJ20)
CAVRDGNDYKLSF

SEQ ID NO: 786958 - protein, 15 aa, Homo sapiens
  CDR3 for beta chain variable domain of TCR clone 393479 (TRBV7-2, TRBJ2-3)
CASSLGGEGRDTQYF

SEQ ID NO: 786959 - protein, 13 aa, Homo sapiens
  CDR3 for alpha chain variable domain of TCR clone 393480 (TRAV12-2, TRAJ7)
CAVSLYGKNRLAF

SEQ ID NO: 786960 - protein, 18 aa, Homo sapiens
  CDR3 for beta chain variable domain of TCR clone 393480 (TRBV4-2, TRBJ2-1)
CASSQQGLAASSYNEQFF

SEQ ID NO: 786961 - protein, 16 aa, Homo sapiens
  CDR3 for alpha chain variable domain of TCR clone 393481 (TRAV1-2, TRAJ10)
CAVRGVLTGGGNKRTF

SEQ ID NO: 786962 - protein, 17 aa, Homo sapiens
  CDR3 for beta chain variable domain of TCR clone 393481 (TRBV3-1, TRBJ2-5)
CASSQDTLAGGGETQYF

SEQ ID NO: 786963 - protein, 12 aa, Homo sapiens
  CDR3 for alpha chain variable domain of TCR clone 393482 (TRAV30, TRAJ43)
CGTEERGNDMRF

SEQ ID NO: 786964 - protein, 11 aa, Homo sapiens
  CDR3 for beta chain variable domain of TCR clone 393482 (TRBV29-1, TRBJ2-5)
CSEDRTGTQDF

SEQ ID NO: 786965 - protein, 13 aa, Homo sapiens
  CDR3 for alpha chain variable domain of TCR clone 393483 (TRAV3, TRAJ21)
CAVRAPDFNKFYF

SEQ ID NO: 786966 - protein, 14 aa, Homo sapiens
  CDR3 for beta chain variable domain of TCR clone 393483 (TRBV7-2, TRBJ2-5)
CASSPRGSSETQYF

SEQ ID NO: 786967 - protein, 14 aa, Homo sapiens
  CDR3 for alpha chain variable domain of TCR clone 393484 (TRAV12-2, TRAJ17)
CAVLFKAAGNKLTF

SEQ ID NO: 786968 - protein, 13 aa, Homo sapiens
  CDR3 for beta chain variable domain of TCR clone 393484 (TRBV7-6, TRBJ1-2)
CASSLVADYGYTF

SEQ ID NO: 786969 - protein, 12 aa, Homo sapiens
  CDR3 for alpha chain variable domain of TCR clone 393485 (TRAV13-1, TRAJ20)
CAASMGDYKRSF

SEQ ID NO: 786970 - protein, 15 aa, Homo sapiens
  CDR3 for beta chain variable domain of TCR clone 393485 (TRBV11-3, TRBJ2-3)
CASNGGLDSTDTQYF

SEQ ID NO: 786971 - protein, 14 aa, Homo sapiens
  CDR3 for alpha chain variable domain of TCR clone 393486 (TRAV8-4, TRAJ16)
CAVSPVGRWPEAAL

SEQ ID NO: 786972 - protein, 11 aa, Homo sapiens
  CDR3 for beta chain variable domain of TCR clone 393486 (TRBV29-1, TRBJ2-5)
CSEDRTGTQYI

SEQ ID NO: 786973 - protein, 13 aa, Homo sapiens
  CDR3 for alpha chain variable domain of TCR clone 393487 (TRAV12-2, TRAJ34)
CAVRGYNTDTLIF

SEQ ID NO: 786974 - protein, 18 aa, Homo sapiens
  CDR3 for beta chain variable domain of TCR clone 393487 (TRBV11-2, TRBJ2-3)
CASSLGGASRGAPNTQYF

SEQ ID NO: 786975 - protein, 15 aa, Homo sapiens
  CDR3 for alpha chain variable domain of TCR clone 393488 (TRAV2, TRAJ22)
CAVPSRGGSARQLTF

SEQ ID NO: 786976 - protein, 16 aa, Homo sapiens
  CDR3 for beta chain variable domain of TCR clone 393488 (TRBV7-3, TRBJ2-2)
CASSLKRGTLSGELFF

SEQ ID NO: 786977 - protein, 14 aa, Homo sapiens
  CDR3 for alpha chain variable domain of TCR clone 393489 (TRAV17, TRAJ20)
CATLSGSNDYKLSF

SEQ ID NO: 786978 - protein, 20 aa, Homo sapiens
  CDR3 for beta chain variable domain of TCR clone 393489 (TRBV28, TRBJ2-1)
CASTPIGRSPGLAGGNEQFF

SEQ ID NO: 786979 - protein, 17 aa, Homo sapiens
  CDR3 for alpha chain variable domain of TCR clone 393490 (TRAV20, TRAJ42)
CAVQAWGYGGSQGNLIF

SEQ ID NO: 786980 - protein, 16 aa, Homo sapiens
  CDR3 for beta chain variable domain of TCR clone 393490 (TRBV29-1, TRBJ2-5)
CSVEGLAGDYQETHYF

SEQ ID NO: 786981 - protein, 16 aa, Homo sapiens
  CDR3 for alpha chain variable domain of TCR clone 393491 (TRAV8-3, TRAJ13)
CAMGAYPSGGYQKVTF

SEQ ID NO: 786982 - protein, 15 aa, Homo sapiens
  CDR3 for beta chain variable domain of TCR clone 393491 (TRBV19, TRBJ1-5)
CASSIVWADNQPQHF

SEQ ID NO: 786983 - protein, 14 aa, Homo sapiens
  CDR3 for alpha chain variable domain of TCR clone 393492 (TRAV14/DV4, TRAJ15)
CAMRRDQAGTALIF

SEQ ID NO: 786984 - protein, 14 aa, Homo sapiens
  CDR3 for beta chain variable domain of TCR clone 393492 (TRBV19, TRBJ2-5)
CASSMTGQQETQYF

SEQ ID NO: 786985 - protein, 12 aa, Homo sapiens
  CDR3 for alpha chain variable domain of TCR clone 393493 (TRAV12-2, TRAJ43)
CAVNGNNNNMRF

SEQ ID NO: 786986 - protein, 14 aa, Homo sapiens
  CDR3 for beta chain variable domain of TCR clone 393493 (TRBV12-5, TRBJ2-5)
CASGSRTHQETQYF

SEQ ID NO: 786987 - protein, 14 aa, Homo sapiens
  CDR3 for alpha chain variable domain of TCR clone 393494 (TRAV13-1, TRAJ17)
LSSRSRAAGNKLTF

SEQ ID NO: 786988 - protein, 14 aa, Homo sapiens
  CDR3 for beta chain variable domain of TCR clone 393494 (TRBV7-9, TRBJ2-1)
CASSSMVGFGEQFF

SEQ ID NO: 786989 - protein, 14 aa, Homo sapiens
  CDR3 for alpha chain variable domain of TCR clone 393495 (TRAV17, TRAJ31)
CATCLRNNNARLMF

SEQ ID NO: 786990 - protein, 14 aa, Homo sapiens
  CDR3 for beta chain variable domain of TCR clone 393495 (TRBV12-4, TRBJ2-5)
CASSLWQKQETQYF

SEQ ID NO: 786991 - protein, 14 aa, Homo sapiens
  CDR3 for alpha chain variable domain of TCR clone 393496 (TRAV4, TRAJ9)
CLVGSGTGGFKTIF

SEQ ID NO: 786992 - protein, 15 aa, Homo sapiens
  CDR3 for beta chain variable domain of TCR clone 393496 (TRBV4-1, TRBJ1-4)
CASSDTGGTNEKLFF

SEQ ID NO: 786993 - protein, 13 aa, Homo sapiens
  CDR3 for alpha chain variable domain of TCR clone 393497 (TRAV8-3, TRAJ43)
CALGPDNNNDMRF

SEQ ID NO: 786994 - protein, 14 aa, Homo sapiens
  CDR3 for beta chain variable domain of TCR clone 393497 (TRBV20-1, TRBJ1-3)
CSASPTGAGNTIYF

SEQ ID NO: 786995 - protein, 14 aa, Homo sapiens
  CDR3 for alpha chain variable domain of TCR clone 393498 (TRAV38-1, TRAJ43)
CAFMKHNNNKNMRF

SEQ ID NO: 786996 - protein, 14 aa, Homo sapiens
  CDR3 for beta chain variable domain of TCR clone 393498 (TRBV5-4, TRBJ1-1)
CASSLDSRRDEAFF

SEQ ID NO: 786997 - protein, 15 aa, Homo sapiens
  CDR3 for alpha chain variable domain of TCR clone 393499 (TRAV26-1, TRAJ37)
CIVIVADGNTGKLIF

SEQ ID NO: 786998 - protein, 14 aa, Homo sapiens
  CDR3 for beta chain variable domain of TCR clone 393499 (TRBV10-3, TRBJ2-2)
CATFGQLNTGELFL

SEQ ID NO: 786999 - protein, 16 aa, Homo sapiens
  CDR3 for alpha chain variable domain of TCR clone 393500 (TRAV16, TRAJ42)
CALSGYYGGSQGNLIF

SEQ ID NO: 787000 - protein, 17 aa, Homo sapiens
  CDR3 for beta chain variable domain of TCR clone 393500 (TRBV7-3, TRBJ2-5)
CASSLGSGRSRSETQYF

SEQ ID NO: 787001 - protein, 11 aa, Homo sapiens
  CDR3 for alpha chain variable domain of TCR clone 393501 (TRAV12-2, TRAJ29)
YAVTLRSPLVF

SEQ ID NO: 787002 - protein, 16 aa, Homo sapiens
  CDR3 for beta chain variable domain of TCR clone 393501 (TRBV29-1, TRBJ2-2)
CSVETRASGNTGELFF

SEQ ID NO: 787003 - protein, 13 aa, Homo sapiens
  CDR3 for alpha chain variable domain of TCR clone 393502 (TRAV13-1, TRAJ6)
CAARRGGSYIPPF

SEQ ID NO: 787004 - protein, 16 aa, Homo sapiens
  CDR3 for beta chain variable domain of TCR clone 393502 (TRBV20-1, TRBJ1-4)
CSAPGQGLLTNEKLFF

SEQ ID NO: 787005 - protein, 10 aa, Homo sapiens
  CDR3 for alpha chain variable domain of TCR clone 393503 (TRAV38-2/DV8, TRAJ40)
CASGTYKYIF

SEQ ID NO: 787006 - protein, 14 aa, Homo sapiens
  CDR3 for beta chain variable domain of TCR clone 393503 (TRBV7-9, TRBJ2-1)
CASSPRDYPYEQFF

SEQ ID NO: 787007 - protein, 14 aa, Homo sapiens
  CDR3 for alpha chain variable domain of TCR clone 393504 (TRAV12-2, TRAJ6)
CASKWGGGSYIPTL

SEQ ID NO: 787008 - protein, 16 aa, Homo sapiens
  CDR3 for beta chain variable domain of TCR clone 393504 (TRBV7-3, TRBJ2-2)
CASSLKRGTLSGELFF

SEQ ID NO: 787009 - protein, 15 aa, Homo sapiens
  CDR3 for alpha chain variable domain of TCR clone 393505 (TRAV17, TRAJ57)
CSTGPSQGGSEQLVF

SEQ ID NO: 787010 - protein, 16 aa, Homo sapiens
  CDR3 for beta chain variable domain of TCR clone 393505 (TRBV12-4, TRBJ1-5)
CASSRPVGGSNQPQHF

SEQ ID NO: 787011 - protein, 16 aa, Homo sapiens
  CDR3 for alpha chain variable domain of TCR clone 393506 (TRAV3, TRAJ37)
CAVRVRGSGITGKLIF

SEQ ID NO: 787012 - protein, 16 aa, Homo sapiens
  CDR3 for beta chain variable domain of TCR clone 393506 (TRBV11-2, TRBJ2-7)
CASSPTTGGVSYEQYF

SEQ ID NO: 787013 - protein, 15 aa, Homo sapiens
  CDR3 for alpha chain variable domain of TCR clone 393507 (TRAV3, TRAJ22)
CAVRDRRGSARPLTF

SEQ ID NO: 787014 - protein, 16 aa, Homo sapiens
  CDR3 for beta chain variable domain of TCR clone 393507 (TRBV5-4, TRBJ2-3)
CASQQPGAGGADTQYF

SEQ ID NO: 787015 - protein, 17 aa, Homo sapiens
  CDR3 for alpha chain variable domain of TCR clone 393508 (TRAV36/DV7, TRAJ52)
CAVAKRAGGTSYGKLTF

SEQ ID NO: 787016 - protein, 15 aa, Homo sapiens
  CDR3 for beta chain variable domain of TCR clone 393508 (TRBV6-5, TRBJ1-2)
CASSYSQAFNYGYTF

SEQ ID NO: 787017 - protein, 12 aa, Homo sapiens
  CDR3 for alpha chain variable domain of TCR clone 393509 (TRAV12-3, TRAJ17)
CAMTLTGNKLTF

SEQ ID NO: 787018 - protein, 15 aa, Homo sapiens
  CDR3 for beta chain variable domain of TCR clone 393509 (TRBV20-1, TRBJ2-7)
CSARARVCGMDEQYF

SEQ ID NO: 787019 - protein, 15 aa, Homo sapiens
  CDR3 for alpha chain variable domain of TCR clone 393510 (TRAV8-4, TRAJ3)
CAVTGENLVQQCVQD

SEQ ID NO: 787020 - protein, 16 aa, Homo sapiens
  CDR3 for beta chain variable domain of TCR clone 393510 (TRBV4-2, TRBJ1-1)
CASSQAGFGMNTEAFF

SEQ ID NO: 787021 - protein, 13 aa, Homo sapiens
  CDR3 for alpha chain variable domain of TCR clone 393511 (TRAV12-3, TRAJ40)
CAMSARGTYKYIF

SEQ ID NO: 787022 - protein, 11 aa, Homo sapiens
  CDR3 for beta chain variable domain of TCR clone 393511 (TRBV11-2, TRBJ2-2)
CASSLPGELFF

SEQ ID NO: 787023 - protein, 17 aa, Homo sapiens
  CDR3 for alpha chain variable domain of TCR clone 393512 (TRAV12-2, TRAJ45)
CAVNIWGSGGGADGLTF

SEQ ID NO: 787024 - protein, 18 aa, Homo sapiens
  CDR3 for beta chain variable domain of TCR clone 393512 (TRBV20-1, TRBJ2-6)
CSAKTTPTHGSGANVLTF

SEQ ID NO: 787025 - protein, 15 aa, Homo sapiens
  CDR3 for alpha chain variable domain of TCR clone 393513 (TRAV12-2, TRAJ53)
CAVNGGGGSNYKLTF

SEQ ID NO: 787026 - protein, 17 aa, Homo sapiens
  CDR3 for beta chain variable domain of TCR clone 393513 (TRBV3-1, TRBJ2-6)
CASSPNTGPAGANVLTF

SEQ ID NO: 787027 - protein, 12 aa, Homo sapiens
  CDR3 for alpha chain variable domain of TCR clone 393514 (TRAV13-1, TRAJ15)
CAASQAGTALIS

SEQ ID NO: 787028 - protein, 14 aa, Homo sapiens
  CDR3 for beta chain variable domain of TCR clone 393514 (TRBV19, TRBJ2-2)
CASGTLHRSGELFF

SEQ ID NO: 787029 - protein, 13 aa, Homo sapiens
  CDR3 for alpha chain variable domain of TCR clone 393515 (TRAV1-2, TRAJ9)
CAALNTGGFKTII

SEQ ID NO: 787030 - protein, 13 aa, Homo sapiens
  CDR3 for beta chain variable domain of TCR clone 393515 (TRBV11-2, TRBJ2-5)
CASSRGPSETQYF

SEQ ID NO: 787031 - protein, 14 aa, Homo sapiens
  CDR3 for alpha chain variable domain of TCR clone 393516 (TRAV8-3, TRAJ21)
CAVGLNPRSDKFYF

SEQ ID NO: 787032 - protein, 16 aa, Homo sapiens
  CDR3 for beta chain variable domain of TCR clone 393516 (TRBV7-9, TRBJ2-7)
CAGSSPSANTVNEQYF

SEQ ID NO: 787033 - protein, 14 aa, Homo sapiens
  CDR3 for alpha chain variable domain of TCR clone 393517 (TRAV16, TRAJ33)
FALSAMDSNYQLIW

SEQ ID NO: 787034 - protein, 16 aa, Homo sapiens
  CDR3 for beta chain variable domain of TCR clone 393517 (TRBV12-4, TRBJ2-3)
CASSFPSNTNTDTQCF

SEQ ID NO: 787035 - protein, 13 aa, Homo sapiens
  CDR3 for alpha chain variable domain of TCR clone 393518 (TRAV16, TRAJ34)
CALTGYNTDKLIF

SEQ ID NO: 787036 - protein, 17 aa, Homo sapiens
  CDR3 for beta chain variable domain of TCR clone 393518 (TRBV20-1, TRBJ2-2)
CSASGSGQGGLTGELFF

SEQ ID NO: 787037 - protein, 13 aa, Homo sapiens
  CDR3 for alpha chain variable domain of TCR clone 393519 (TRAV16, TRAJ28)
CAPTGAGSYKLTF

SEQ ID NO: 787038 - protein, 16 aa, Homo sapiens
  CDR3 for beta chain variable domain of TCR clone 393519 (TRBV28, TRBJ1-5)
CASSLTGQGWNQPQHF

SEQ ID NO: 787039 - protein, 15 aa, Homo sapiens
  CDR3 for alpha chain variable domain of TCR clone 393520 (TRAV8-3, TRAJ6)
CAVGEDRGGSYIPTF

SEQ ID NO: 787040 - protein, 16 aa, Homo sapiens
  CDR3 for beta chain variable domain of TCR clone 393520 (TRBV5-1, TRBJ2-7)
CASSWGTGGRAWEQYF

SEQ ID NO: 787041 - protein, 17 aa, Homo sapiens
  CDR3 for alpha chain variable domain of TCR clone 393521 (TRAV27, TRAJ26)
WAGARAPLDNYGQNFVF

SEQ ID NO: 787042 - protein, 15 aa, Homo sapiens
  CDR3 for beta chain variable domain of TCR clone 393521 (TRBV11-2, TRBJ2-5)
CASSPRSGGLETQYF

SEQ ID NO: 787043 - protein, 13 aa, Homo sapiens
  CDR3 for alpha chain variable domain of TCR clone 393522 (TRAV3, TRAJ41)
CAVSSHSGYALNF

SEQ ID NO: 787044 - protein, 13 aa, Homo sapiens
  CDR3 for beta chain variable domain of TCR clone 393522 (TRBV20-1, TRBJ2-2)
CSALSGGAGELFF

SEQ ID NO: 787045 - protein, 13 aa, Homo sapiens
  CDR3 for alpha chain variable domain of TCR clone 393523 (TRAV12-2, TRAJ4)
CAVFFGGYNKLIF

SEQ ID NO: 787046 - protein, 16 aa, Homo sapiens
  CDR3 for beta chain variable domain of TCR clone 393523 (TRBV6-1, TRBJ1-2)
CASSEYAAGANYGYTF

SEQ ID NO: 787047 - protein, 14 aa, Homo sapiens
  CDR3 for alpha chain variable domain of TCR clone 393524 (TRAV25, TRAJ44)
CAVFPTATASKLTF

SEQ ID NO: 787048 - protein, 14 aa, Homo sapiens
  CDR3 for beta chain variable domain of TCR clone 393524 (TRBV19, TRBJ1-1)
CASTGHRLNTEAFF

SEQ ID NO: 787049 - protein, 13 aa, Homo sapiens
  CDR3 for alpha chain variable domain of TCR clone 393525 (TRAV13-1, TRAJ21)
CAASIYNFNEFYF

SEQ ID NO: 787050 - protein, 13 aa, Homo sapiens
  CDR3 for beta chain variable domain of TCR clone 393525 (TRBV27, TRBJ1-4)
CASSVMGDEKLFF

SEQ ID NO: 787051 - protein, 11 aa, Homo sapiens
  CDR3 for alpha chain variable domain of TCR clone 393526 (TRAV17, TRAJ9)
CATTGCFKTIF

SEQ ID NO: 787052 - protein, 13 aa, Homo sapiens
  CDR3 for beta chain variable domain of TCR clone 393526 (TRBV6-5, TRBJ1-1)
VTSGTPPVGEAFF

SEQ ID NO: 787053 - protein, 14 aa, Homo sapiens
  CDR3 for alpha chain variable domain of TCR clone 393527 (TRAV29/DV5, TRAJ28)
CAATAGAGSYQLTF

SEQ ID NO: 787054 - protein, 13 aa, Homo sapiens
  CDR3 for beta chain variable domain of TCR clone 393527 (TRBV20-1, TRBJ1-5)
CSASGRGNQPQHF

SEQ ID NO: 787055 - protein, 13 aa, Homo sapiens
  CDR3 for alpha chain variable domain of TCR clone 393528 (TRAV8-3, TRAJ40)
CAVGAQYLRNLQI

SEQ ID NO: 787056 - protein, 15 aa, Homo sapiens
  CDR3 for beta chain variable domain of TCR clone 393528 (TRBV12-5, TRBJ2-2)
CASGRLGGNTGELFF

SEQ ID NO: 787057 - protein, 12 aa, Homo sapiens
  CDR3 for alpha chain variable domain of TCR clone 393529 (TRAV13-1, TRAJ21)
CAAKEGFNKFYF

SEQ ID NO: 787058 - protein, 14 aa, Homo sapiens
  CDR3 for beta chain variable domain of TCR clone 393529 (TRBV5-4, TRBJ1-1)
CASSLDSRRDEAFV

SEQ ID NO: 787059 - protein, 15 aa, Homo sapiens
  CDR3 for alpha chain variable domain of TCR clone 393530 (TRAV3, TRAJ15)
CAVSPANQAGTALIF

SEQ ID NO: 787060 - protein, 14 aa, Homo sapiens
  CDR3 for beta chain variable domain of TCR clone 393530 (TRBV4-1, TRBJ2-2)
CASSQAVNTGELFF

SEQ ID NO: 787061 - protein, 15 aa, Homo sapiens
  CDR3 for alpha chain variable domain of TCR clone 393531 (TRAV21, TRAJ10)
CAVRGLTGGGNKLTF

SEQ ID NO: 787062 - protein, 16 aa, Homo sapiens
  CDR3 for beta chain variable domain of TCR clone 393531 (TRBV7-2, TRBJ2-7)
CASSLEAGGPWYEQYF

SEQ ID NO: 787063 - protein, 17 aa, Homo sapiens
  CDR3 for alpha chain variable domain of TCR clone 393532 (TRAV3, TRAJ42)
CAVRYRDYGGSQGNLIF

SEQ ID NO: 787064 - protein, 14 aa, Homo sapiens
  CDR3 for beta chain variable domain of TCR clone 393532 (TRBV7-2, TRBJ2-5)
CASSPRGSSETQYF

SEQ ID NO: 787065 - protein, 14 aa, Homo sapiens
  CDR3 for alpha chain variable domain of TCR clone 393533 (TRAV3, TRAJ22)
CAVRDYGSARQLTF

SEQ ID NO: 787066 - protein, 16 aa, Homo sapiens
  CDR3 for beta chain variable domain of TCR clone 393533 (TRBV6-1, TRBJ2-1)
CASILRQGSSYNEQFF

SEQ ID NO: 787067 - protein, 13 aa, Homo sapiens
  CDR3 for alpha chain variable domain of TCR clone 393534 (TRAV21, TRAJ10)
CAVPTGGGNKLTF

SEQ ID NO: 787068 - protein, 14 aa, Homo sapiens
  CDR3 for beta chain variable domain of TCR clone 393534 (TRBV25-1, TRBJ1-1)
CASTHLGGNTEAFF

SEQ ID NO: 787069 - protein, 13 aa, Homo sapiens
  CDR3 for alpha chain variable domain of TCR clone 393535 (TRAV12-1, TRAJ22)
CVASGGSARQLTF

SEQ ID NO: 787070 - protein, 14 aa, Homo sapiens
  CDR3 for beta chain variable domain of TCR clone 393535 (TRBV6-1, TRBJ2-6)
CASQQGAGANVLTF

SEQ ID NO: 787071 - protein, 17 aa, Homo sapiens
  CDR3 for alpha chain variable domain of TCR clone 393536 (TRAV3, TRAJ7)
CAVRDMSRLEGTTDSLL

SEQ ID NO: 787072 - protein, 15 aa, Homo sapiens
  CDR3 for beta chain variable domain of TCR clone 393536 (TRBV6-3, TRBJ2-7)
CASSSPGTVFYEQYF

SEQ ID NO: 787073 - protein, 13 aa, Homo sapiens
  CDR3 for alpha chain variable domain of TCR clone 393537 (TRAV3, TRAJ27)
CAVRPLGAGKSTF

SEQ ID NO: 787074 - protein, 19 aa, Homo sapiens
  CDR3 for beta chain variable domain of TCR clone 393537 (TRBV28, TRBJ2-1)
CASSFSIRGSGRTRYEQFF

SEQ ID NO: 787075 - protein, 15 aa, Homo sapiens
  CDR3 for alpha chain variable domain of TCR clone 393538 (TRAV8-3, TRAJ27)
CAVGPTKTNAGKSTF

SEQ ID NO: 787076 - protein, 13 aa, Homo sapiens
  CDR3 for beta chain variable domain of TCR clone 393538 (TRBV20-1, TRBJ1-1)
CSARGGGNTEAFF

SEQ ID NO: 787077 - protein, 15 aa, Homo sapiens
  CDR3 for alpha chain variable domain of TCR clone 393539 (TRAV26-2, TRAJ50)
CILRDEETSYDKVIF

SEQ ID NO: 787078 - protein, 20 aa, Homo sapiens
  CDR3 for beta chain variable domain of TCR clone 393539 (TRBV19, TRBJ2-1)
CASSISRTVTSTRLNNEQFF

SEQ ID NO: 787079 - protein, 18 aa, Homo sapiens
  CDR3 for alpha chain variable domain of TCR clone 393540 (TRAV26-2, TRAJ32)
CILRAPLNYGGATNKLIF

SEQ ID NO: 787080 - protein, 14 aa, Homo sapiens
  CDR3 for beta chain variable domain of TCR clone 393540 (TRBV19, TRBJ2-1)
CASSRLASINEQFF

SEQ ID NO: 787081 - protein, 13 aa, Homo sapiens
  CDR3 for alpha chain variable domain of TCR clone 393541 (TRAV2, TRAJ40)
CAVVTSGTYKYIF

SEQ ID NO: 787082 - protein, 13 aa, Homo sapiens
  CDR3 for beta chain variable domain of TCR clone 393541 (TRBV19, TRBJ2-1)
CRSDFRLSGEQFF

SEQ ID NO: 787083 - protein, 16 aa, Homo sapiens
  CDR3 for alpha chain variable domain of TCR clone 393542 (TRAV3, TRAJ10)
CAVRDMRAGGGNKLNF

SEQ ID NO: 787084 - protein, 16 aa, Homo sapiens
  CDR3 for beta chain variable domain of TCR clone 393542 (TRBV12-4, TRBJ1-5)
CASSRPVGGSNQPQHF

SEQ ID NO: 787085 - protein, 14 aa, Homo sapiens
  CDR3 for alpha chain variable domain of TCR clone 393543 (TRAV26-1, TRAJ21)
CIVRPPYNFNKFYF

SEQ ID NO: 787086 - protein, 14 aa, Homo sapiens
  CDR3 for beta chain variable domain of TCR clone 393543 (TRBV11-3, TRBJ2-1)
CANSATTSGSIQFF

SEQ ID NO: 787087 - protein, 14 aa, Homo sapiens
  CDR3 for alpha chain variable domain of TCR clone 393544 (TRAV16, TRAJ33)
CALSAMDSNYQLIW

SEQ ID NO: 787088 - protein, 12 aa, Homo sapiens
  CDR3 for beta chain variable domain of TCR clone 393544 (TRBV5-1, TRBJ1-2)
CASSQDTYSYTF

SEQ ID NO: 787089 - protein, 15 aa, Homo sapiens
  CDR3 for alpha chain variable domain of TCR clone 393545 (TRAV35, TRAJ40)
CAGQLWDSGTDKYIF

SEQ ID NO: 787090 - protein, 12 aa, Homo sapiens
  CDR3 for beta chain variable domain of TCR clone 393545 (TRBV7-8, TRBJ2-7)
CASSLAGYEQYF

SEQ ID NO: 787091 - protein, 14 aa, Homo sapiens
  CDR3 for alpha chain variable domain of TCR clone 393546 (TRAV16, TRAJ33)
CALSAMDSNYQLIW

SEQ ID NO: 787092 - protein, 17 aa, Homo sapiens
  CDR3 for beta chain variable domain of TCR clone 393546 (TRBV25-1, TRBJ2-7)
CASSDARVDFSSYEQYF

SEQ ID NO: 787093 - protein, 15 aa, Homo sapiens
  CDR3 for alpha chain variable domain of TCR clone 393547 (TRAV8-4, TRAJ12)
CAGSDRVDSSYKLIF

SEQ ID NO: 787094 - protein, 15 aa, Homo sapiens
  CDR3 for beta chain variable domain of TCR clone 393547 (TRBV11-3, TRBJ2-1)
CASSLAGQTYNEQFF

SEQ ID NO: 787095 - protein, 15 aa, Homo sapiens
  CDR3 for alpha chain variable domain of TCR clone 393548 (TRAV26-2, TRAJ50)
CILRDEATSYDKVIF

SEQ ID NO: 787096 - protein, 17 aa, Homo sapiens
  CDR3 for beta chain variable domain of TCR clone 393548 (TRBV5-7, TRBJ1-6)
CASSLATGDTYNSPLHF

SEQ ID NO: 787097 - protein, 12 aa, Homo sapiens
  CDR3 for alpha chain variable domain of TCR clone 393549 (TRAV8-3, TRAJ20)
CAVGGGDYKLSL

SEQ ID NO: 787098 - protein, 12 aa, Homo sapiens
  CDR3 for beta chain variable domain of TCR clone 393549 (TRBV3-1, TRBJ2-7)
CASSQVRYAQYF

SEQ ID NO: 787099 - protein, 10 aa, Homo sapiens
  CDR3 for alpha chain variable domain of TCR clone 393550 (TRAV23/DV6, TRAJ31)
CARGGARLMF

SEQ ID NO: 787100 - protein, 16 aa, Homo sapiens
  CDR3 for beta chain variable domain of TCR clone 393550 (TRBV9, TRBJ1-2)
CASSVEEKVSPYGYTF

SEQ ID NO: 787101 - protein, 15 aa, Homo sapiens
  CDR3 for alpha chain variable domain of TCR clone 393551 (TRAV20, TRAJ6)
CAVRLQSGGSYIPTF

SEQ ID NO: 787102 - protein, 12 aa, Homo sapiens
  CDR3 for beta chain variable domain of TCR clone 393551 (TRBV5-1, TRBJ2-5)
CASSLGLETQYF

SEQ ID NO: 787103 - protein, 12 aa, Homo sapiens
  CDR3 for alpha chain variable domain of TCR clone 393552 (TRAV21, TRAJ42)
CAVGGSQGNLIF

SEQ ID NO: 787104 - protein, 13 aa, Homo sapiens
  CDR3 for beta chain variable domain of TCR clone 393552 (TRBV20-1, TRBJ2-7)
CSATHTSGYEQYF

SEQ ID NO: 787105 - protein, 13 aa, Homo sapiens
  CDR3 for alpha chain variable domain of TCR clone 393553 (TRAV35, TRAJ42)
CAGFPGSQGNLLF

SEQ ID NO: 787106 - protein, 14 aa, Homo sapiens
  CDR3 for beta chain variable domain of TCR clone 393553 (TRBV4-1, TRBJ2-2)
CASSQAVNTGELFF

SEQ ID NO: 787107 - protein, 14 aa, Homo sapiens
  CDR3 for alpha chain variable domain of TCR clone 393554 (TRAV12-3, TRAJ42)
CAMNYGGSQGNLIF

SEQ ID NO: 787108 - protein, 12 aa, Homo sapiens
  CDR3 for beta chain variable domain of TCR clone 393554 (TRBV7-6, TRBJ2-5)
CASSLSQETQYF

SEQ ID NO: 787109 - protein, 15 aa, Homo sapiens
  CDR3 for alpha chain variable domain of TCR clone 393555 (TRAV35, TRAJ20)
CAGQLVGSNDYKLSF

SEQ ID NO: 787110 - protein, 17 aa, Homo sapiens
  CDR3 for beta chain variable domain of TCR clone 393555 (TRBV5-5, TRBJ1-2)
CASSLGSLDGQSEGYTF

SEQ ID NO: 787111 - protein, 14 aa, Homo sapiens
  CDR3 for alpha chain variable domain of TCR clone 393556 (TRAV1-2, TRAJ8)
CAVREDTGFQKLVF

SEQ ID NO: 787112 - protein, 15 aa, Homo sapiens
  CDR3 for beta chain variable domain of TCR clone 393556 (TRBV6-3, TRBJ2-7)
CACSSPGTVFYELYF

SEQ ID NO: 787113 - protein, 16 aa, Homo sapiens
  CDR3 for alpha chain variable domain of TCR clone 393557 (TRAV12-3, TRAJ4)
CAMTRLFSGGYNKLIF

SEQ ID NO: 787114 - protein, 14 aa, Homo sapiens
  CDR3 for beta chain variable domain of TCR clone 393557 (TRBV11-2, TRBJ2-5)
CASSRTGGIETQYF

SEQ ID NO: 787115 - protein, 13 aa, Homo sapiens
  CDR3 for alpha chain variable domain of TCR clone 393558 (TRAV1-2, TRAJ9)
CAALNTGGSKTIF

SEQ ID NO: 787116 - protein, 12 aa, Homo sapiens
  CDR3 for beta chain variable domain of TCR clone 393558 (TRBV11-3, TRBJ1-1)
CASSHRLGEAFF

SEQ ID NO: 787117 - protein, 12 aa, Homo sapiens
  CDR3 for alpha chain variable domain of TCR clone 393559 (TRAV12-3, TRAJ17)
CAMTLTGNKLTF

SEQ ID NO: 787118 - protein, 13 aa, Homo sapiens
  CDR3 for beta chain variable domain of TCR clone 393559 (TRBV7-9, TRBJ1-2)
CASSLKRNYGYTF

SEQ ID NO: 787119 - protein, 11 aa, Homo sapiens
  CDR3 for alpha chain variable domain of TCR clone 393560 (TRAV1-2, TRAJ20)
CAVSNDYKLSF

SEQ ID NO: 787120 - protein, 15 aa, Homo sapiens
  CDR3 for beta chain variable domain of TCR clone 393560 (TRBV5-1, TRBJ2-2)
CASSSQGGNTGELFV

SEQ ID NO: 787121 - protein, 16 aa, Homo sapiens
  CDR3 for alpha chain variable domain of TCR clone 393561 (TRAV3, TRAJ37)
CAVRTHGSGNTGKLIF

SEQ ID NO: 787122 - protein, 15 aa, Homo sapiens
  CDR3 for beta chain variable domain of TCR clone 393561 (TRBV20-1, TRBJ2-7)
CSARDRVSGMDEQYF

SEQ ID NO: 787123 - protein, 22 aa, Homo sapiens
  CDR3 for alpha chain variable domain of TCR clone 393562 (TRAV12-2, TRAJ53)
SPVIQPPTPVPPILSSNYKLTF

SEQ ID NO: 787124 - protein, 13 aa, Homo sapiens
  CDR3 for beta chain variable domain of TCR clone 393562 (TRBV7-7, TRBJ2-3)
CASSLSRADTHYF

SEQ ID NO: 787125 - protein, 15 aa, Homo sapiens
  CDR3 for alpha chain variable domain of TCR clone 393563 (TRAV8-3, TRAJ11)
CAVGLLNSGYSTLTF

SEQ ID NO: 787126 - protein, 16 aa, Homo sapiens
  CDR3 for beta chain variable domain of TCR clone 393563 (TRBV7-9, TRBJ1-2)
CASSLAFSSGEDGYTF

SEQ ID NO: 787127 - protein, 17 aa, Homo sapiens
  CDR3 for alpha chain variable domain of TCR clone 393564 (TRAV4, TRAJ42)
CLVGVLNYGGSQGNLIF

SEQ ID NO: 787128 - protein, 12 aa, Homo sapiens
  CDR3 for beta chain variable domain of TCR clone 393564 (TRBV20-1, TRBJ2-1)
CSAQYTYNEQFF

SEQ ID NO: 787129 - protein, 14 aa, Homo sapiens
  CDR3 for alpha chain variable domain of TCR clone 393565 (TRAV1-2, TRAJ16)
CAVNRFSDGQKLLF

SEQ ID NO: 787130 - protein, 14 aa, Homo sapiens
  CDR3 for beta chain variable domain of TCR clone 393565 (TRBV4-1, TRBJ2-2)
CASSQAVNTAELFF

SEQ ID NO: 787131 - protein, 22 aa, Homo sapiens
  CDR3 for alpha chain variable domain of TCR clone 393566 (TRAV27, TRAJ38)
CAARRNAGNNQIQNPDPAVYQL

SEQ ID NO: 787132 - protein, 13 aa, Homo sapiens
  CDR3 for beta chain variable domain of TCR clone 393566 (TRBV12-5, TRBJ2-3)
CASGDRQSDTQYF

SEQ ID NO: 787133 - protein, 16 aa, Homo sapiens
  CDR3 for alpha chain variable domain of TCR clone 393567 (TRAV10, TRAJ15)
CVVTRTPNQAGTALIF

SEQ ID NO: 787134 - protein, 16 aa, Homo sapiens
  CDR3 for beta chain variable domain of TCR clone 393567 (TRBV5-4, TRBJ2-1)
CASSLVGSGQDNEQFF

SEQ ID NO: 787135 - protein, 14 aa, Homo sapiens
  CDR3 for alpha chain variable domain of TCR clone 393568 (TRAV10, TRAJ47)
CVVSLMEYRNKLVF

SEQ ID NO: 787136 - protein, 16 aa, Homo sapiens
  CDR3 for beta chain variable domain of TCR clone 393568 (TRBV28, TRBJ2-3)
CASSLFTGVSTDTQYF

SEQ ID NO: 787137 - protein, 13 aa, Homo sapiens
  CDR3 for alpha chain variable domain of TCR clone 393569 (TRAV23/DV6, TRAJ9)
CAASTTGGFKTIF

SEQ ID NO: 787138 - protein, 15 aa, Homo sapiens
  CDR3 for beta chain variable domain of TCR clone 393569 (TRBV28, TRBJ2-1)
CASSIIAGGRSEQFF

SEQ ID NO: 787139 - protein, 13 aa, Homo sapiens
  CDR3 for alpha chain variable domain of TCR clone 393570 (TRAV12-2, TRAJ54)
CLQEDQGAQKLVF

SEQ ID NO: 787140 - protein, 17 aa, Homo sapiens
  CDR3 for beta chain variable domain of TCR clone 393570 (TRBV4-2, TRBJ2-1)
CASSQCPGQGIYNEQFF

SEQ ID NO: 787141 - protein, 16 aa, Homo sapiens
  CDR3 for alpha chain variable domain of TCR clone 393571 (TRAV26-1, TRAJ52)
CIVSNAGGTCYGKLTF

SEQ ID NO: 787142 - protein, 15 aa, Homo sapiens
  CDR3 for beta chain variable domain of TCR clone 393571 (TRBV7-3, TRBJ2-1)
CASSPTGGGEVEQFF

SEQ ID NO: 787143 - protein, 14 aa, Homo sapiens
  CDR3 for alpha chain variable domain of TCR clone 393572 (TRAV8-2, TRAJ37)
CVVSISCNTGKLIF

SEQ ID NO: 787144 - protein, 13 aa, Homo sapiens
  CDR3 for beta chain variable domain of TCR clone 393572 (TRBV7-8, TRBJ2-7)
RRVRLTEMGGQYF

SEQ ID NO: 787145 - protein, 13 aa, Homo sapiens
  CDR3 for alpha chain variable domain of TCR clone 393573 (TRAV1-2, TRAJ26)
CAVRHNYGQNFVF

SEQ ID NO: 787146 - protein, 14 aa, Homo sapiens
  CDR3 for beta chain variable domain of TCR clone 393573 (TRBV4-1, TRBJ2-5)
CASSQDLALETQYF

SEQ ID NO: 787147 - protein, 13 aa, Homo sapiens
  CDR3 for alpha chain variable domain of TCR clone 393574 (TRAV12-2, TRAJ49)
CAVKPNTGNQFYF

SEQ ID NO: 787148 - protein, 12 aa, Homo sapiens
  CDR3 for beta chain variable domain of TCR clone 393574 (TRBV7-9, TRBJ2-7)
CASSRTVYEQYF

SEQ ID NO: 787149 - protein, 14 aa, Homo sapiens
  CDR3 for alpha chain variable domain of TCR clone 393575 (TRAV1-2, TRAJ16)
CAVNRFSDGQKLLF

SEQ ID NO: 787150 - protein, 13 aa, Homo sapiens
  CDR3 for beta chain variable domain of TCR clone 393575 (TRBV2, TRBJ1-1)
CASTLGLNTEAFF

SEQ ID NO: 787151 - protein, 15 aa, Homo sapiens
  CDR3 for alpha chain variable domain of TCR clone 393576 (TRAV12-1, TRAJ44)
CVADLPTGTASKLTF

SEQ ID NO: 787152 - protein, 16 aa, Homo sapiens
  CDR3 for beta chain variable domain of TCR clone 393576 (TRBV7-9, TRBJ1-2)
CASSLGFSSGEDGYTF

SEQ ID NO: 787153 - protein, 11 aa, Homo sapiens
  CDR3 for alpha chain variable domain of TCR clone 393577 (TRAV1-2, TRAJ20)
CAVANDYKLSF

SEQ ID NO: 787154 - protein, 13 aa, Homo sapiens
  CDR3 for beta chain variable domain of TCR clone 393577 (TRBV12-4, TRBJ1-5)
CASSPDRAQPQHF

SEQ ID NO: 787155 - protein, 14 aa, Homo sapiens
  CDR3 for alpha chain variable domain of TCR clone 393578 (TRAV12-2, TRAJ13)
CAVKKTGGYQKVTF

SEQ ID NO: 787156 - protein, 13 aa, Homo sapiens
  CDR3 for beta chain variable domain of TCR clone 393578 (TRBV4-2, TRBJ1-1)
CASSQAGDTEAFF

SEQ ID NO: 787157 - protein, 16 aa, Homo sapiens
  CDR3 for alpha chain variable domain of TCR clone 393579 (TRAV12-3, TRAJ53)
CAMSPGSGGSNDKLTF

SEQ ID NO: 787158 - protein, 14 aa, Homo sapiens
  CDR3 for beta chain variable domain of TCR clone 393579 (TRBV4-2, TRBJ2-1)
CASGLDRAYNEQFF

SEQ ID NO: 787159 - protein, 15 aa, Homo sapiens
  CDR3 for alpha chain variable domain of TCR clone 393580 (TRAV13-1, TRAJ27)
CAASTFNTNAGKSTF

SEQ ID NO: 787160 - protein, 13 aa, Homo sapiens
  CDR3 for beta chain variable domain of TCR clone 393580 (TRBV7-9, TRBJ1-2)
CASSLKQNYGYTF

SEQ ID NO: 787161 - protein, 12 aa, Homo sapiens
  CDR3 for alpha chain variable domain of TCR clone 393581 (TRAV12-3, TRAJ17)
CAMTLTGNKLTF

SEQ ID NO: 787162 - protein, 15 aa, Homo sapiens
  CDR3 for beta chain variable domain of TCR clone 393581 (TRBV20-1, TRBJ2-7)
CSGRDRVAGMDEQYF

SEQ ID NO: 787163 - protein, 11 aa, Homo sapiens
  CDR3 for alpha chain variable domain of TCR clone 393582 (TRAV2, TRAJ33)
CAVDSNYQLIW

SEQ ID NO: 787164 - protein, 14 aa, Homo sapiens
  CDR3 for beta chain variable domain of TCR clone 393582 (TRBV15, TRBJ2-5)
CATSMGGSGETQYF

SEQ ID NO: 787165 - protein, 14 aa, Homo sapiens
  CDR3 for alpha chain variable domain of TCR clone 393583 (TRAV17, TRAJ57)
CATDPQGGSEKLVF

SEQ ID NO: 787166 - protein, 16 aa, Homo sapiens
  CDR3 for beta chain variable domain of TCR clone 393583 (TRBV6-1, TRBJ2-5)
CASSETLDRGAETQYF

SEQ ID NO: 787167 - protein, 13 aa, Homo sapiens
  CDR3 for alpha chain variable domain of TCR clone 393584 (TRAV1-2, TRAJ9)
CAALNTGGFNTIF

SEQ ID NO: 787168 - protein, 15 aa, Homo sapiens
  CDR3 for beta chain variable domain of TCR clone 393584 (TRBV11-2, TRBJ1-3)
CASSAHSSSGNTIYF

SEQ ID NO: 787169 - protein, 13 aa, Homo sapiens
  CDR3 for alpha chain variable domain of TCR clone 393585 (TRAV13-2, TRAJ49)
CAETLHGGNQFYF

SEQ ID NO: 787170 - protein, 13 aa, Homo sapiens
  CDR3 for beta chain variable domain of TCR clone 393585 (TRBV6-1, TRBJ1-1)
CASSRQGNTEAFF

SEQ ID NO: 787171 - protein, 16 aa, Homo sapiens
  CDR3 for alpha chain variable domain of TCR clone 393586 (TRAV13-1, TRAJ18)
CAASRMRGSTLGRLYF

SEQ ID NO: 787172 - protein, 17 aa, Homo sapiens
  CDR3 for beta chain variable domain of TCR clone 393586 (TRBV11-2, TRBJ2-1)
CASSLYPPGVEYNEQFF

SEQ ID NO: 787173 - protein, 14 aa, Homo sapiens
  CDR3 for alpha chain variable domain of TCR clone 393587 (TRAV1-2, TRAJ16)
CAVNRFSDVQKLLF

SEQ ID NO: 787174 - protein, 17 aa, Homo sapiens
  CDR3 for beta chain variable domain of TCR clone 393587 (TRBV7-3, TRBJ2-3)
CASSLMKRMRGADTQYF

SEQ ID NO: 787175 - protein, 15 aa, Homo sapiens
  CDR3 for alpha chain variable domain of TCR clone 393588 (TRAV3, TRAJ5)
CAVRDLDTGRRALTF

SEQ ID NO: 787176 - protein, 15 aa, Homo sapiens
  CDR3 for beta chain variable domain of TCR clone 393588 (TRBV20-1, TRBJ2-1)
CSARSPGGPRMSSSS

SEQ ID NO: 787177 - protein, 10 aa, Homo sapiens
  CDR3 for alpha chain variable domain of TCR clone 393589 (TRAV30, TRAJ48)
CGIGNEKLTF

SEQ ID NO: 787178 - protein, 14 aa, Homo sapiens
  CDR3 for beta chain variable domain of TCR clone 393589 (TRBV4-2, TRBJ1-2)
CASSPGGSNYGYTF

SEQ ID NO: 787179 - protein, 15 aa, Homo sapiens
  CDR3 for alpha chain variable domain of TCR clone 393590 (TRAV17, TRAJ35)
CATAFVIGFGNVLHC

SEQ ID NO: 787180 - protein, 15 aa, Homo sapiens
  CDR3 for beta chain variable domain of TCR clone 393590 (TRBV7-2, TRBJ2-3)
CASSLEQGGTDTQYF

SEQ ID NO: 787181 - protein, 13 aa, Homo sapiens
  CDR3 for alpha chain variable domain of TCR clone 393591 (TRAV12-3, TRAJ49)
CAMLSNTGNQFYF

SEQ ID NO: 787182 - protein, 14 aa, Homo sapiens
  CDR3 for beta chain variable domain of TCR clone 393591 (TRBV7-2, TRBJ1-1)
CASSFLTGTTEAFF

SEQ ID NO: 787183 - protein, 12 aa, Homo sapiens
  CDR3 for alpha chain variable domain of TCR clone 393592 (TRAV12-3, TRAJ17)
CAMTLTGNKLTF

SEQ ID NO: 787184 - protein, 18 aa, Homo sapiens
  CDR3 for beta chain variable domain of TCR clone 393592 (TRBV28, TRBJ2-6)
CASSLARRAVSGANVLTF

SEQ ID NO: 787185 - protein, 14 aa, Homo sapiens
  CDR3 for alpha chain variable domain of TCR clone 393593 (TRAV12-3, TRAJ42)
CAMNGGGSQGNLIF

SEQ ID NO: 787186 - protein, 15 aa, Homo sapiens
  CDR3 for beta chain variable domain of TCR clone 393593 (TRBV20-1, TRBJ2-7)
CSARDRVSGMDEQYF

SEQ ID NO: 787187 - protein, 12 aa, Homo sapiens
  CDR3 for alpha chain variable domain of TCR clone 393594 (TRAV13-1, TRAJ49)
CEASSTGNQFYF

SEQ ID NO: 787188 - protein, 14 aa, Homo sapiens
  CDR3 for beta chain variable domain of TCR clone 393594 (TRBV7-2, TRBJ2-5)
CASSPAGNQETQYF

SEQ ID NO: 787189 - protein, 14 aa, Homo sapiens
  CDR3 for alpha chain variable domain of TCR clone 393595 (TRAV12-1, TRAJ22)
CVVTTSGSARQLTF

SEQ ID NO: 787190 - protein, 15 aa, Homo sapiens
  CDR3 for beta chain variable domain of TCR clone 393595 (TRBV20-1, TRBJ1-1)
CSASRGVTGNTEAFF

SEQ ID NO: 787191 - protein, 14 aa, Homo sapiens
  CDR3 for alpha chain variable domain of TCR clone 393596 (TRAV16, TRAJ33)
CALSAMDSNYQLIW

SEQ ID NO: 787192 - protein, 16 aa, Homo sapiens
  CDR3 for beta chain variable domain of TCR clone 393596 (TRBV12-4, TRBJ2-3)
CASSFPSNPNTDTQYF

SEQ ID NO: 787193 - protein, 19 aa, Homo sapiens
  CDR3 for alpha chain variable domain of TCR clone 393597 (TRAV1-2, TRAJ28)
CLLPLCCPILWAGSYQLTF

SEQ ID NO: 787194 - protein, 13 aa, Homo sapiens
  CDR3 for beta chain variable domain of TCR clone 393597 (TRBV20-1, TRBJ2-7)
CSATHTSGYEQYF

SEQ ID NO: 787195 - protein, 16 aa, Homo sapiens
  CDR3 for alpha chain variable domain of TCR clone 393598 (TRAV38-1, TRAJ56)
CAFMKRQTGANSKLTF

SEQ ID NO: 787196 - protein, 13 aa, Homo sapiens
  CDR3 for beta chain variable domain of TCR clone 393598 (TRBV12-5, TRBJ2-3)
CASGDRQSDTQYF

SEQ ID NO: 787197 - protein, 12 aa, Homo sapiens
  CDR3 for alpha chain variable domain of TCR clone 393599 (TRAV1-1, TRAJ8)
CAGGTGFQKLVF

SEQ ID NO: 787198 - protein, 14 aa, Homo sapiens
  CDR3 for beta chain variable domain of TCR clone 393599 (TRBV7-8, TRBJ2-7)
CASSPRDRVYEQYF

SEQ ID NO: 787199 - protein, 13 aa, Homo sapiens
  CDR3 for alpha chain variable domain of TCR clone 393600 (TRAV36/DV7, TRAJ37)
CAVFSSNTGKLIF

SEQ ID NO: 787200 - protein, 15 aa, Homo sapiens
  CDR3 for beta chain variable domain of TCR clone 393600 (TRBV20-1, TRBJ1-1)
CIARDPRGEYTEAFF

SEQ ID NO: 787201 - protein, 23 aa, Homo sapiens
  CDR3 for alpha chain variable domain of TCR clone 393601 (TRAV26-1, TRAJ38)
CIADNAGNNHIQNPDPAVYQLRD

SEQ ID NO: 787202 - protein, 11 aa, Homo sapiens
  CDR3 for beta chain variable domain of TCR clone 393601 (TRBV7-9, TRBJ2-5)
CASSLGDTQYF

SEQ ID NO: 787203 - protein, 14 aa, Homo sapiens
  CDR3 for alpha chain variable domain of TCR clone 393602 (TRAV1-2, TRAJ16)
CAINRFSDGQKLLF

SEQ ID NO: 787204 - protein, 16 aa, Homo sapiens
  CDR3 for beta chain variable domain of TCR clone 393602 (TRBV2, TRBJ2-7)
CASSEPWTGPSYEQYF

SEQ ID NO: 787205 - protein, 16 aa, Homo sapiens
  CDR3 for alpha chain variable domain of TCR clone 393603 (TRAV1-2, TRAJ6)
CAVRDQGTGGSYIPTF

SEQ ID NO: 787206 - protein, 15 aa, Homo sapiens
  CDR3 for beta chain variable domain of TCR clone 393603 (TRBV7-2, TRBJ2-1)
CASSSGLAGGNEQFF

SEQ ID NO: 787207 - protein, 13 aa, Homo sapiens
  CDR3 for alpha chain variable domain of TCR clone 393604 (TRAV1-2, TRAJ9)
CAALNTGGFKTLF

SEQ ID NO: 787208 - protein, 13 aa, Homo sapiens
  CDR3 for beta chain variable domain of TCR clone 393604 (TRBV12-4, TRBJ2-3)
CASSSPLGGTQYF

SEQ ID NO: 787209 - protein, 17 aa, Homo sapiens
  CDR3 for alpha chain variable domain of TCR clone 393605 (TRAV12-3, TRAJ6)
CAMSARGGAGGSYIPTF

SEQ ID NO: 787210 - protein, 16 aa, Homo sapiens
  CDR3 for beta chain variable domain of TCR clone 393605 (TRBV13, TRBJ2-2)
CASSPRTGEHTGELFF

SEQ ID NO: 787211 - protein, 15 aa, Homo sapiens
  CDR3 for alpha chain variable domain of TCR clone 393606 (TRAV20, TRAJ53)
CAVQASGGSNYKLTF

SEQ ID NO: 787212 - protein, 12 aa, Homo sapiens
  CDR3 for beta chain variable domain of TCR clone 393606 (TRBV7-6, TRBJ2-5)
CASSLSQETQYC

SEQ ID NO: 787213 - protein, 12 aa, Homo sapiens
  CDR3 for alpha chain variable domain of TCR clone 393607 (TRAV17, TRAJ48)
CALNFGNEKLTF

SEQ ID NO: 787214 - protein, 13 aa, Homo sapiens
  CDR3 for beta chain variable domain of TCR clone 393607 (TRBV6-5, TRBJ2-5)
CASSAPGGETQYF

SEQ ID NO: 787215 - protein, 14 aa, Homo sapiens
  CDR3 for alpha chain variable domain of TCR clone 393608 (TRAV8-2, TRAJ39)
CVVIWNNAGNMLTF

SEQ ID NO: 787216 - protein, 15 aa, Homo sapiens
  CDR3 for beta chain variable domain of TCR clone 393608 (TRBV6-3, TRBJ2-7)
CASSSPGTVFYEQYF

SEQ ID NO: 787217 - protein, 14 aa, Homo sapiens
  CDR3 for alpha chain variable domain of TCR clone 393609 (TRAV26-1, TRAJ45)
CIELTGGGADGLTF

SEQ ID NO: 787218 - protein, 15 aa, Homo sapiens
  CDR3 for beta chain variable domain of TCR clone 393609 (TRBV5-1, TRBJ1-1)
CASSSTTGTNTEAFF

SEQ ID NO: 787219 - protein, 16 aa, Homo sapiens
  CDR3 for alpha chain variable domain of TCR clone 393610 (TRAV13-1, TRAJ45)
CAAPKESGGGADGLTF

SEQ ID NO: 787220 - protein, 17 aa, Homo sapiens
  CDR3 for beta chain variable domain of TCR clone 393610 (TRBV4-1, TRBJ2-7)
CASSRDPLGVRGGEQYF

SEQ ID NO: 787221 - protein, 13 aa, Homo sapiens
  CDR3 for alpha chain variable domain of TCR clone 393611 (TRAV21, TRAJ15)
CAVRNQAGTALIF

SEQ ID NO: 787222 - protein, 16 aa, Homo sapiens
  CDR3 for beta chain variable domain of TCR clone 393611 (TRBV20-1, TRBJ2-5)
CSPGGASGGYMETRYF

SEQ ID NO: 787223 - protein, 15 aa, Homo sapiens
  CDR3 for alpha chain variable domain of TCR clone 393612 (TRAV3, TRAJ3)
CAVRDGHSSASKIIF

SEQ ID NO: 787224 - protein, 13 aa, Homo sapiens
  CDR3 for beta chain variable domain of TCR clone 393612 (TRBV27, TRBJ2-7)
CASSRDRKSEQYF

SEQ ID NO: 787225 - protein, 15 aa, Homo sapiens
  CDR3 for alpha chain variable domain of TCR clone 393613 (TRAV3, TRAJ5)
CAVRDLDKGRRALTF

SEQ ID NO: 787226 - protein, 14 aa, Homo sapiens
  CDR3 for beta chain variable domain of TCR clone 393613 (TRBV25-1, TRBJ1-1)
CASTHLGGNTEAFF

SEQ ID NO: 787227 - protein, 15 aa, Homo sapiens
  CDR3 for alpha chain variable domain of TCR clone 393614 (TRAV8-3, TRAJ11)
CAVGLLNSGYSTLTL

SEQ ID NO: 787228 - protein, 23 aa, Homo sapiens
  CDR3 for beta chain variable domain of TCR clone 393614 (TRBV7-9, TRBJ1-2)
EAQLEKSRLLSDRFSSGEDGYTF

SEQ ID NO: 787229 - protein, 16 aa, Homo sapiens
  CDR3 for alpha chain variable domain of TCR clone 393615 (TRAV8-6, TRAJ37)
CAVSGLGSSNTGKLIF

SEQ ID NO: 787230 - protein, 15 aa, Homo sapiens
  CDR3 for beta chain variable domain of TCR clone 393615 (TRBV20-1, TRBJ1-5)
CSARSGPSMKQPQHF

SEQ ID NO: 787231 - protein, 15 aa, Homo sapiens
  CDR3 for alpha chain variable domain of TCR clone 393616 (TRAV26-1, TRAJ27)
CIVRVLTPMQAHQPL

SEQ ID NO: 787232 - protein, 13 aa, Homo sapiens
  CDR3 for beta chain variable domain of TCR clone 393616 (TRBV20-1, TRBJ2-7)
CSATHTSGYEQYF

SEQ ID NO: 787233 - protein, 15 aa, Homo sapiens
  CDR3 for alpha chain variable domain of TCR clone 393617 (TRAV21, TRAJ24)
CAAWSSTGSWGKLQF

SEQ ID NO: 787234 - protein, 13 aa, Homo sapiens
  CDR3 for beta chain variable domain of TCR clone 393617 (TRBV10-3, TRBJ2-7)
CASKLAVNYEQYF

SEQ ID NO: 787235 - protein, 16 aa, Homo sapiens
  CDR3 for alpha chain variable domain of TCR clone 393618 (TRAV13-1, TRAJ18)
CAASRMRGTTLGRLYF

SEQ ID NO: 787236 - protein, 16 aa, Homo sapiens
  CDR3 for beta chain variable domain of TCR clone 393618 (TRBV27, TRBJ1-1)
CASSSRGRTGYTEAFF

SEQ ID NO: 787237 - protein, 17 aa, Homo sapiens
  CDR3 for alpha chain variable domain of TCR clone 393619 (TRAV26-1, TRAJ28)
CIVRARYSGAGSYQLTF

SEQ ID NO: 787238 - protein, 13 aa, Homo sapiens
  CDR3 for beta chain variable domain of TCR clone 393619 (TRBV7-3, TRBJ1-1)
CASSQDWGAEAFF

SEQ ID NO: 787239 - protein, 13 aa, Homo sapiens
  CDR3 for alpha chain variable domain of TCR clone 393620 (TRAV3, TRAJ43)
CAVKARHNNDMRF

SEQ ID NO: 787240 - protein, 16 aa, Homo sapiens
  CDR3 for beta chain variable domain of TCR clone 393620 (TRBV7-9, TRBJ2-3)
CASSFSVAGGTDTQYF

SEQ ID NO: 787241 - protein, 16 aa, Homo sapiens
  CDR3 for alpha chain variable domain of TCR clone 393621 (TRAV30, TRAJ24)
CGTEIVDADSWGKFQF

SEQ ID NO: 787242 - protein, 15 aa, Homo sapiens
  CDR3 for beta chain variable domain of TCR clone 393621 (TRBV7-9, TRBJ1-4)
CASSARMGGNEKLFF

SEQ ID NO: 787243 - protein, 14 aa, Homo sapiens
  CDR3 for alpha chain variable domain of TCR clone 393622 (TRAV13-1, TRAJ40)
CAASMTSGTYKYIF

SEQ ID NO: 787244 - protein, 13 aa, Homo sapiens
  CDR3 for beta chain variable domain of TCR clone 393622 (TRBV4-1, TRBJ2-5)
CASSQEVQETQCF

SEQ ID NO: 787245 - protein, 12 aa, Homo sapiens
  CDR3 for alpha chain variable domain of TCR clone 393623 (TRAV12-3, TRAJ17)
CAMTLTGNKLTF

SEQ ID NO: 787246 - protein, 17 aa, Homo sapiens
  CDR3 for beta chain variable domain of TCR clone 393623 (TRBV3-1, TRBJ2-2)
CASSQFRDKVDTGELFF

SEQ ID NO: 787247 - protein, 13 aa, Homo sapiens
  CDR3 for alpha chain variable domain of TCR clone 393624 (TRAV13-1, TRAJ47)
CAASIEYGNKLVF

SEQ ID NO: 787248 - protein, 15 aa, Homo sapiens
  CDR3 for beta chain variable domain of TCR clone 393624 (TRBV4-1, TRBJ2-1)
CASSQVLAGGDEQFF

SEQ ID NO: 787249 - protein, 14 aa, Homo sapiens
  CDR3 for alpha chain variable domain of TCR clone 393625 (TRAV17, TRAJ23)
CATASYNQGGKLIF

SEQ ID NO: 787250 - protein, 16 aa, Homo sapiens
  CDR3 for beta chain variable domain of TCR clone 393625 (TRBV12-4, TRBJ2-5)
CASSFFVRGRQETQYF

SEQ ID NO: 787251 - protein, 14 aa, Homo sapiens
  CDR3 for alpha chain variable domain of TCR clone 393626 (TRAV34, TRAJ44)
CGADGTGTASKLTF

SEQ ID NO: 787252 - protein, 14 aa, Homo sapiens
  CDR3 for beta chain variable domain of TCR clone 393626 (TRBV7-6, TRBJ1-6)
CASSQAGGGSPLHF

SEQ ID NO: 787253 - protein, 16 aa, Homo sapiens
  CDR3 for alpha chain variable domain of TCR clone 393627 (TRAV38-2/DV8, TRAJ47)
CAYRSAIMEYGNKLVF

SEQ ID NO: 787254 - protein, 14 aa, Homo sapiens
  CDR3 for beta chain variable domain of TCR clone 393627 (TRBV19, TRBJ2-7)
GASSIFAGTYEQYF

SEQ ID NO: 787255 - protein, 15 aa, Homo sapiens
  CDR3 for alpha chain variable domain of TCR clone 393628 (TRAV12-3, TRAJ52)
CNGGAGGTSYGKLTF

SEQ ID NO: 787256 - protein, 13 aa, Homo sapiens
  CDR3 for beta chain variable domain of TCR clone 393628 (TRBV20-1, TRBJ2-5)
CSARGDFQETQYF

SEQ ID NO: 787257 - protein, 18 aa, Homo sapiens
  CDR3 for alpha chain variable domain of TCR clone 393629 (TRAV12-3, TRAJ52)
CAMSVGGAGGTSYGKLTF

SEQ ID NO: 787258 - protein, 13 aa, Homo sapiens
  CDR3 for beta chain variable domain of TCR clone 393629 (TRBV28, TRBJ2-5)
CASSFAGGETQYF

SEQ ID NO: 787259 - protein, 18 aa, Homo sapiens
  CDR3 for alpha chain variable domain of TCR clone 393630 (TRAV9-2, TRAJ10)
CALSDGALASGGGNKPTF

SEQ ID NO: 787260 - protein, 16 aa, Homo sapiens
  CDR3 for beta chain variable domain of TCR clone 393630 (TRBV28, TRBJ2-7)
CASSSSGTSGSYEQYF

SEQ ID NO: 787261 - protein, 14 aa, Homo sapiens
  CDR3 for alpha chain variable domain of TCR clone 393631 (TRAV16, TRAJ15)
CALSFNQAGTGLIF

SEQ ID NO: 787262 - protein, 16 aa, Homo sapiens
  CDR3 for beta chain variable domain of TCR clone 393631 (TRBV9, TRBJ2-7)
CASSAGPDRSPYEQYF

SEQ ID NO: 787263 - protein, 13 aa, Homo sapiens
  CDR3 for alpha chain variable domain of TCR clone 393632 (TRAV8-3, TRAJ36)
CAVGATGGNNLFF

SEQ ID NO: 787264 - protein, 15 aa, Homo sapiens
  CDR3 for beta chain variable domain of TCR clone 393632 (TRBV7-2, TRBJ1-2)
CASSPRAGWNYGYTF

SEQ ID NO: 787265 - protein, 15 aa, Homo sapiens
  CDR3 for alpha chain variable domain of TCR clone 393633 (TRAV12-3, TRAJ6)
CAMSATSGGSYIPTF

SEQ ID NO: 787266 - protein, 16 aa, Homo sapiens
  CDR3 for beta chain variable domain of TCR clone 393633 (TRBV7-2, TRBJ1-5)
CASSPWGPEGNQPQHF

SEQ ID NO: 787267 - protein, 14 aa, Homo sapiens
  CDR3 for alpha chain variable domain of TCR clone 393634 (TRAV22, TRAJ6)
CAGVGPGGSYIPTF

SEQ ID NO: 787268 - protein, 12 aa, Homo sapiens
  CDR3 for beta chain variable domain of TCR clone 393634 (TRBV6-1, TRBJ2-7)
CASSDYSYEQYF

SEQ ID NO: 787269 - protein, 17 aa, Homo sapiens
  CDR3 for alpha chain variable domain of TCR clone 393635 (TRAV3, TRAJ6)
CAVRDGPRAGGSYIPTF

SEQ ID NO: 787270 - protein, 15 aa, Homo sapiens
  CDR3 for beta chain variable domain of TCR clone 393635 (TRBV4-3, TRBJ2-3)
CASSLGTRSSDTQYF

SEQ ID NO: 787271 - protein, 14 aa, Homo sapiens
  CDR3 for alpha chain variable domain of TCR clone 393636 (TRAV2, TRAJ9)
CAVGDRSGGFKTIF

SEQ ID NO: 787272 - protein, 14 aa, Homo sapiens
  CDR3 for beta chain variable domain of TCR clone 393636 (TRBV7-9, TRBJ2-7)
CASSPSGGQNEQYF

SEQ ID NO: 787273 - protein, 12 aa, Homo sapiens
  CDR3 for alpha chain variable domain of TCR clone 393637 (TRAV2, TRAJ10)
CASTGGGNKLTF

SEQ ID NO: 787274 - protein, 14 aa, Homo sapiens
  CDR3 for beta chain variable domain of TCR clone 393637 (TRBV25-1, TRBJ2-1)
CASSKTGGYNEQFF

SEQ ID NO: 787275 - protein, 15 aa, Homo sapiens
  CDR3 for alpha chain variable domain of TCR clone 393638 (TRAV26-1, TRAJ29)
CIVRVEGSGNTPLVC

SEQ ID NO: 787276 - protein, 15 aa, Homo sapiens
  CDR3 for beta chain variable domain of TCR clone 393638 (TRBV7-9, TRBJ1-5)
CASSQGHQPTQPQHF

SEQ ID NO: 787277 - protein, 11 aa, Homo sapiens
  CDR3 for alpha chain variable domain of TCR clone 393639 (TRAV2, TRAJ20)
CAVLNYYKLSF

SEQ ID NO: 787278 - protein, 16 aa, Homo sapiens
  CDR3 for beta chain variable domain of TCR clone 393639 (TRBV11-1, TRBJ2-2)
CASSAEGLKNTGELFF

SEQ ID NO: 787279 - protein, 13 aa, Homo sapiens
  CDR3 for alpha chain variable domain of TCR clone 393640 (TRAV16, TRAJ11)
CALLNSGYSTLTF

SEQ ID NO: 787280 - protein, 15 aa, Homo sapiens
  CDR3 for beta chain variable domain of TCR clone 393640 (TRBV11-3, TRBJ2-1)
CASSGGTSSLDEQFF

SEQ ID NO: 787281 - protein, 14 aa, Homo sapiens
  CDR3 for alpha chain variable domain of TCR clone 393641 (TRAV12-2, TRAJ13)
CAVKKTGGYQKVTF

SEQ ID NO: 787282 - protein, 14 aa, Homo sapiens
  CDR3 for beta chain variable domain of TCR clone 393641 (TRBV20-1, TRBJ2-3)
CSARVRGSTDTQYF

SEQ ID NO: 787283 - protein, 12 aa, Homo sapiens
  CDR3 for alpha chain variable domain of TCR clone 393642 (TRAV12-3, TRAJ17)
CAMTLTGNQLTF

SEQ ID NO: 787284 - protein, 15 aa, Homo sapiens
  CDR3 for beta chain variable domain of TCR clone 393642 (TRBV20-1, TRBJ2-7)
CSAGDRVSGMDEQYF

SEQ ID NO: 787285 - protein, 11 aa, Homo sapiens
  CDR3 for alpha chain variable domain of TCR clone 393643 (TRAV2, TRAJ23)
CAVETRGQLIF

SEQ ID NO: 787286 - protein, 17 aa, Homo sapiens
  CDR3 for beta chain variable domain of TCR clone 393643 (TRBV20-1, TRBJ2-1)
CSASSSGLAGSYNEQFF

SEQ ID NO: 787287 - protein, 16 aa, Homo sapiens
  CDR3 for alpha chain variable domain of TCR clone 393644 (TRAV17, TRAJ22)
CSTGPISSGSARQLTF

SEQ ID NO: 787288 - protein, 13 aa, Homo sapiens
  CDR3 for beta chain variable domain of TCR clone 393644 (TRBV11-2, TRBJ2-1)
CASSLGLAGGRFF

SEQ ID NO: 787289 - protein, 11 aa, Homo sapiens
  CDR3 for alpha chain variable domain of TCR clone 393645 (TRAV3, TRAJ21)
CAVGNFNKFHF

SEQ ID NO: 787290 - protein, 16 aa, Homo sapiens
  CDR3 for beta chain variable domain of TCR clone 393645 (TRBV19, TRBJ2-1)
CASSKAGASSYNEQFF

SEQ ID NO: 787291 - protein, 14 aa, Homo sapiens
  CDR3 for alpha chain variable domain of TCR clone 393646 (TRAV27, TRAJ44)
CAASFTGTASQLTF

SEQ ID NO: 787292 - protein, 13 aa, Homo sapiens
  CDR3 for beta chain variable domain of TCR clone 393646 (TRBV27, TRBJ2-3)
CATSSGGLYTQYF

SEQ ID NO: 787293 - protein, 16 aa, Homo sapiens
  CDR3 for alpha chain variable domain of TCR clone 393647 (TRAV12-1, TRAJ22)
CVVNTISSGSARRLTF

SEQ ID NO: 787294 - protein, 13 aa, Homo sapiens
  CDR3 for beta chain variable domain of TCR clone 393647 (TRBV19, TRBJ2-1)
CASNGGVFSEQFF

SEQ ID NO: 787295 - protein, 12 aa, Homo sapiens
  CDR3 for alpha chain variable domain of TCR clone 393648 (TRAV13-1, TRAJ40)
CAASWATYKSIF

SEQ ID NO: 787296 - protein, 15 aa, Homo sapiens
  CDR3 for beta chain variable domain of TCR clone 393648 (TRBV7-8, TRBJ2-1)
CASSSRLAAYNEQFF

SEQ ID NO: 787297 - protein, 12 aa, Homo sapiens
  CDR3 for alpha chain variable domain of TCR clone 393649 (TRAV13-1, TRAJ31)
CAVRDGNARLMF

SEQ ID NO: 787298 - protein, 18 aa, Homo sapiens
  CDR3 for beta chain variable domain of TCR clone 393649 (TRBV7-2, TRBJ2-3)
CASSVKREGSGITDTQYF

SEQ ID NO: 787299 - protein, 12 aa, Homo sapiens
  CDR3 for alpha chain variable domain of TCR clone 393650 (TRAV17, TRAJ39)
CATGAAGNMLTF

SEQ ID NO: 787300 - protein, 13 aa, Homo sapiens
  CDR3 for beta chain variable domain of TCR clone 393650 (TRBV11-2, TRBJ2-1)
CASSLGLAGGRFF

SEQ ID NO: 787301 - protein, 12 aa, Homo sapiens
  CDR3 for alpha chain variable domain of TCR clone 393651 (TRAV3, TRAJ7)
CADLLWEQQTRF

SEQ ID NO: 787302 - protein, 13 aa, Homo sapiens
  CDR3 for beta chain variable domain of TCR clone 393651 (TRBV7-9, TRBJ1-2)
CASSLKQNYGYTF

SEQ ID NO: 787303 - protein, 15 aa, Homo sapiens
  CDR3 for alpha chain variable domain of TCR clone 393652 (TRAV12-1, TRAJ23)
CGERSRCNQGGKLIF

SEQ ID NO: 787304 - protein, 12 aa, Homo sapiens
  CDR3 for beta chain variable domain of TCR clone 393652 (TRBV11-2, TRBJ2-2)
CASSLGGGELFF

SEQ ID NO: 787305 - protein, 14 aa, Homo sapiens
  CDR3 for alpha chain variable domain of TCR clone 393653 (TRAV12-3, TRAJ10)
SHLPPTGGGNKLTF

SEQ ID NO: 787306 - protein, 13 aa, Homo sapiens
  CDR3 for beta chain variable domain of TCR clone 393653 (TRBV7-7, TRBJ2-5)
CASSRSGQETQYF

SEQ ID NO: 787307 - protein, 16 aa, Homo sapiens
  CDR3 for alpha chain variable domain of TCR clone 393654 (TRAV3, TRAJ37)
FAVRGKGSGNTGKLIF

SEQ ID NO: 787308 - protein, 15 aa, Homo sapiens
  CDR3 for beta chain variable domain of TCR clone 393654 (TRBV7-9, TRBJ2-2)
CASGPLDTFPGELFF

SEQ ID NO: 787309 - protein, 12 aa, Homo sapiens
  CDR3 for alpha chain variable domain of TCR clone 393655 (TRAV8-3, TRAJ26)
CAGDNYGQNFVF

SEQ ID NO: 787310 - protein, 15 aa, Homo sapiens
  CDR3 for beta chain variable domain of TCR clone 393655 (TRBV9, TRBJ2-1)
CASSLEGSSYNEQFF

SEQ ID NO: 787311 - protein, 14 aa, Homo sapiens
  CDR3 for alpha chain variable domain of TCR clone 393656 (TRAV12-3, TRAJ10)
SHLPLTGEGNKLTF

SEQ ID NO: 787312 - protein, 12 aa, Homo sapiens
  CDR3 for beta chain variable domain of TCR clone 393656 (TRBV7-8, TRBJ2-7)
CASNLGDREQYF

SEQ ID NO: 787313 - protein, 16 aa, Homo sapiens
  CDR3 for alpha chain variable domain of TCR clone 393657 (TRAV3, TRAJ37)
CAVRGKGSGNTGKLIF

SEQ ID NO: 787314 - protein, 13 aa, Homo sapiens
  CDR3 for beta chain variable domain of TCR clone 393657 (TRBV7-3, TRBJ1-1)
CASSLTQGTEAFF

SEQ ID NO: 787315 - protein, 15 aa, Homo sapiens
  CDR3 for alpha chain variable domain of TCR clone 393658 (TRAV21, TRAJ53)
CATLNSGGSNYKLTF

SEQ ID NO: 787316 - protein, 16 aa, Homo sapiens
  CDR3 for beta chain variable domain of TCR clone 393658 (TRBV9, TRBJ2-1)
CASSVVGGGNYNEQFF

SEQ ID NO: 787317 - protein, 11 aa, Homo sapiens
  CDR3 for alpha chain variable domain of TCR clone 393659 (TRAV2, TRAJ33)
CAVESTYQLIW

SEQ ID NO: 787318 - protein, 15 aa, Homo sapiens
  CDR3 for beta chain variable domain of TCR clone 393659 (TRBV19, TRBJ1-1)
CASTSGPIQNTEAFF

SEQ ID NO: 787319 - protein, 14 aa, Homo sapiens
  CDR3 for alpha chain variable domain of TCR clone 393660 (TRAV29/DV5, TRAJ20)
CAATIRSNVYKPSF

SEQ ID NO: 787320 - protein, 15 aa, Homo sapiens
  CDR3 for beta chain variable domain of TCR clone 393660 (TRBV20-1, TRBJ2-1)
CSASSAGSSYNEQFF

SEQ ID NO: 787321 - protein, 20 aa, Homo sapiens
  CDR3 for alpha chain variable domain of TCR clone 393661 (TRAV12-1, TRAJ42)
SSVIQPPTSVKGGSQGNLIF

SEQ ID NO: 787322 - protein, 12 aa, Homo sapiens
  CDR3 for beta chain variable domain of TCR clone 393661 (TRBV24-1, TRBJ2-7)
CATSDPGYEQYF

SEQ ID NO: 787323 - protein, 13 aa, Homo sapiens
  CDR3 for alpha chain variable domain of TCR clone 393662 (TRAV25, TRAJ48)
CAGPKGGNEKLTF

SEQ ID NO: 787324 - protein, 15 aa, Homo sapiens
  CDR3 for beta chain variable domain of TCR clone 393662 (TRBV19, TRBJ1-2)
CASSVGQVLNYGYTF

SEQ ID NO: 787325 - protein, 12 aa, Homo sapiens
  CDR3 for alpha chain variable domain of TCR clone 393663 (TRAV16, TRAJ10)
CSRTGGGNKLTY

SEQ ID NO: 787326 - protein, 13 aa, Homo sapiens
  CDR3 for beta chain variable domain of TCR clone 393663 (TRBV15, TRBJ2-7)
CATSTTGHYEQYF

SEQ ID NO: 787327 - protein, 13 aa, Homo sapiens
  CDR3 for alpha chain variable domain of TCR clone 393664 (TRAV13-1, TRAJ10)
CAATAGGGNKITF

SEQ ID NO: 787328 - protein, 14 aa, Homo sapiens
  CDR3 for beta chain variable domain of TCR clone 393664 (TRBV12-4, TRBJ2-7)
CASSPAGLKYEQYF

SEQ ID NO: 787329 - protein, 14 aa, Homo sapiens
  CDR3 for alpha chain variable domain of TCR clone 393665 (TRAV1-1, TRAJ27)
CAVIYNTNAGKSTF

SEQ ID NO: 787330 - protein, 11 aa, Homo sapiens
  CDR3 for beta chain variable domain of TCR clone 393665 (TRBV7-9, TRBJ2-3)
CASSPTDTQYF

SEQ ID NO: 787331 - protein, 15 aa, Homo sapiens
  CDR3 for alpha chain variable domain of TCR clone 393666 (TRAV12-3, TRAJ58)
CAMRRQETSGSRLTF

SEQ ID NO: 787332 - protein, 15 aa, Homo sapiens
  CDR3 for beta chain variable domain of TCR clone 393666 (TRBV7-9, TRBJ2-7)
CASSLRTSGSYEQYF

SEQ ID NO: 787333 - protein, 15 aa, Homo sapiens
  CDR3 for alpha chain variable domain of TCR clone 393667 (TRAV12-3, TRAJ49)
CAMAVTPNTGNQFYF

SEQ ID NO: 787334 - protein, 14 aa, Homo sapiens
  CDR3 for beta chain variable domain of TCR clone 393667 (TRBV7-8, TRBJ2-3)
CASSLGAGTDTQYF

SEQ ID NO: 787335 - protein, 13 aa, Homo sapiens
  CDR3 for alpha chain variable domain of TCR clone 393668 (TRAV27, TRAJ57)
CAGVRRADLKAGL

SEQ ID NO: 787336 - protein, 11 aa, Homo sapiens
  CDR3 for beta chain variable domain of TCR clone 393668 (TRBV11-2, TRBJ1-1)
CASSINTEASF

SEQ ID NO: 787337 - protein, 15 aa, Homo sapiens
  CDR3 for alpha chain variable domain of TCR clone 393669 (TRAV21, TRAJ53)
CATLNSGGSNYKLTF

SEQ ID NO: 787338 - protein, 13 aa, Homo sapiens
  CDR3 for beta chain variable domain of TCR clone 393669 (TRBV7-9, TRBJ2-3)
CASSPGSTETQYF

SEQ ID NO: 787339 - protein, 12 aa, Homo sapiens
  CDR3 for alpha chain variable domain of TCR clone 393670 (TRAV8-3, TRAJ43)
CAVGSGNNDMRF

SEQ ID NO: 787340 - protein, 14 aa, Homo sapiens
  CDR3 for beta chain variable domain of TCR clone 393670 (TRBV4-2, TRBJ1-5)
CASSRDRGNQPQHF

SEQ ID NO: 787341 - protein, 13 aa, Homo sapiens
  CDR3 for alpha chain variable domain of TCR clone 393671 (TRAV23/DV6, TRAJ47)
CAASVRNGIWKQT

SEQ ID NO: 787342 - protein, 13 aa, Homo sapiens
  CDR3 for beta chain variable domain of TCR clone 393671 (TRBV19, TRBJ1-2)
CASSQGQVYGDTF

SEQ ID NO: 787343 - protein, 13 aa, Homo sapiens
  CDR3 for alpha chain variable domain of TCR clone 393672 (TRAV12-3, TRAJ13)
CAMSSGGYQKVTF

SEQ ID NO: 787344 - protein, 15 aa, Homo sapiens
  CDR3 for beta chain variable domain of TCR clone 393672 (TRBV20-1, TRBJ2-7)
CSARDRVSGMDEQYF

SEQ ID NO: 787345 - protein, 16 aa, Homo sapiens
  CDR3 for alpha chain variable domain of TCR clone 393673 (TRAV20, TRAJ10)
CAVLRGLTGGGNKLTF

SEQ ID NO: 787346 - protein, 13 aa, Homo sapiens
  CDR3 for beta chain variable domain of TCR clone 393673 (TRBV6-5, TRBJ2-5)
CASSPQGGETQYF

SEQ ID NO: 787347 - protein, 14 aa, Homo sapiens
  CDR3 for alpha chain variable domain of TCR clone 393674 (TRAV20, TRAJ56)
CAVQVGGANSKLTF

SEQ ID NO: 787348 - protein, 16 aa, Homo sapiens
  CDR3 for beta chain variable domain of TCR clone 393674 (TRBV12-4, TRBJ2-5)
CASSFFVRGRQETQYF

SEQ ID NO: 787349 - protein, 11 aa, Homo sapiens
  CDR3 for alpha chain variable domain of TCR clone 393675 (TRAV12-1, TRAJ16)
CGDPDGQKLLF

SEQ ID NO: 787350 - protein, 13 aa, Homo sapiens
  CDR3 for beta chain variable domain of TCR clone 393675 (TRBV27, TRBJ1-4)
CASSLMGDERLFF

SEQ ID NO: 787351 - protein, 14 aa, Homo sapiens
  CDR3 for alpha chain variable domain of TCR clone 393676 (TRAV26-1, TRAJ38)
CIADNAGNNRKLIW

SEQ ID NO: 787352 - protein, 14 aa, Homo sapiens
  CDR3 for beta chain variable domain of TCR clone 393676 (TRBV5-1, TRBJ2-3)
CASSLFGPTDTQYF

SEQ ID NO: 787353 - protein, 12 aa, Homo sapiens
  CDR3 for alpha chain variable domain of TCR clone 393677 (TRAV12-2, TRAJ10)
WGVTGGGNKLTF

SEQ ID NO: 787354 - protein, 15 aa, Homo sapiens
  CDR3 for beta chain variable domain of TCR clone 393677 (TRBV5-1, TRBJ2-3)
CARSVTSGSTDTQYF

SEQ ID NO: 787355 - protein, 16 aa, Homo sapiens
  CDR3 for alpha chain variable domain of TCR clone 393678 (TRAV12-3, TRAJ53)
CAMSPGSGGSNYKLTF

SEQ ID NO: 787356 - protein, 17 aa, Homo sapiens
  CDR3 for beta chain variable domain of TCR clone 393678 (TRBV4-2, TRBJ1-1)
CASTQFGSGSGNTEAFF

SEQ ID NO: 787357 - protein, 11 aa, Homo sapiens
  CDR3 for alpha chain variable domain of TCR clone 393679 (TRAV3, TRAJ21)
CAVGNFNKFYF

SEQ ID NO: 787358 - protein, 13 aa, Homo sapiens
  CDR3 for beta chain variable domain of TCR clone 393679 (TRBV12-4, TRBJ2-1)
CASSLAENNEQFF

SEQ ID NO: 787359 - protein, 13 aa, Homo sapiens
  CDR3 for alpha chain variable domain of TCR clone 393680 (TRAV12-3, TRAJ48)
CAMSLVGNGKLTF

SEQ ID NO: 787360 - protein, 11 aa, Homo sapiens
  CDR3 for beta chain variable domain of TCR clone 393680 (TRBV7-2, TRBJ2-7)
CASSSGLWQYF

SEQ ID NO: 787361 - protein, 14 aa, Homo sapiens
  CDR3 for alpha chain variable domain of TCR clone 393681 (TRAV1-2, TRAJ8)
CAVREDTGFQKLVF

SEQ ID NO: 787362 - protein, 14 aa, Homo sapiens
  CDR3 for beta chain variable domain of TCR clone 393681 (TRBV20-1, TRBJ1-1)
CIAQTRIGGTEAFF

SEQ ID NO: 787363 - protein, 12 aa, Homo sapiens
  CDR3 for alpha chain variable domain of TCR clone 393682 (TRAV13-1, TRAJ21)
GAAKEGFNKFYF

SEQ ID NO: 787364 - protein, 14 aa, Homo sapiens
  CDR3 for beta chain variable domain of TCR clone 393682 (TRBV5-4, TRBJ1-1)
CASSLDSRRDEDFF

SEQ ID NO: 787365 - protein, 15 aa, Homo sapiens
  CDR3 for alpha chain variable domain of TCR clone 393683 (TRAV26-1, TRAJ28)
CIVRVAGAGSYQLTF

SEQ ID NO: 787366 - protein, 19 aa, Homo sapiens
  CDR3 for beta chain variable domain of TCR clone 393683 (TRBV7-3, TRBJ2-7)
CASSITGVAGGWPSYEQYF

SEQ ID NO: 787367 - protein, 11 aa, Homo sapiens
  CDR3 for alpha chain variable domain of TCR clone 393684 (TRAV2, TRAJ13)
CAFGGYQKVTF

SEQ ID NO: 787368 - protein, 15 aa, Homo sapiens
  CDR3 for beta chain variable domain of TCR clone 393684 (TRBV20-1, TRBJ1-5)
CSARSGPSMNQPQHF

SEQ ID NO: 787369 - protein, 15 aa, Homo sapiens
  CDR3 for alpha chain variable domain of TCR clone 393685 (TRAV26-1, TRAJ29)
CIVRVAGSGNKPLVF

SEQ ID NO: 787370 - protein, 15 aa, Homo sapiens
  CDR3 for beta chain variable domain of TCR clone 393685 (TRBV7-9, TRBJ1-5)
CASSQGHQPNQPQHF

SEQ ID NO: 787371 - protein, 13 aa, Homo sapiens
  CDR3 for alpha chain variable domain of TCR clone 393686 (TRAV6, TRAJ16)
CALDDSDGQKLLF

SEQ ID NO: 787372 - protein, 13 aa, Homo sapiens
  CDR3 for beta chain variable domain of TCR clone 393686 (TRBV10-3, TRBJ2-7)
CASELAVNYEQYF

SEQ ID NO: 787373 - protein, 14 aa, Homo sapiens
  CDR3 for alpha chain variable domain of TCR clone 393687 (TRAV17, TRAJ34)
CATDSLEGTDKLIF

SEQ ID NO: 787374 - protein, 15 aa, Homo sapiens
  CDR3 for beta chain variable domain of TCR clone 393687 (TRBV18, TRBJ2-1)
CASSPPRASYNEQFF

SEQ ID NO: 787375 - protein, 14 aa, Homo sapiens
  CDR3 for alpha chain variable domain of TCR clone 393688 (TRAV12-2, TRAJ17)
CAVLFKSAGNKLTF

SEQ ID NO: 787376 - protein, 12 aa, Homo sapiens
  CDR3 for beta chain variable domain of TCR clone 393688 (TRBV29-1, TRBJ2-3)
CSVTGGADTQYF

SEQ ID NO: 787377 - protein, 14 aa, Homo sapiens
  CDR3 for alpha chain variable domain of TCR clone 393689 (TRAV1-2, TRAJ16)
CAVNRFSDGQKLLF

SEQ ID NO: 787378 - protein, 14 aa, Homo sapiens
  CDR3 for beta chain variable domain of TCR clone 393689 (TRBV2, TRBJ1-5)
CASLGSRDNQPQHF

SEQ ID NO: 787379 - protein, 14 aa, Homo sapiens
  CDR3 for alpha chain variable domain of TCR clone 393690 (TRAV26-1, TRAJ21)
CIVRPPYNFNKFYF

SEQ ID NO: 787380 - protein, 14 aa, Homo sapiens
  CDR3 for beta chain variable domain of TCR clone 393690 (TRBV12-4, TRBJ1-1)
CASSLGTGGTEAFF

SEQ ID NO: 787381 - protein, 13 aa, Homo sapiens
  CDR3 for alpha chain variable domain of TCR clone 393691 (TRAV2, TRAJ15)
CAVASQAGTALIF

SEQ ID NO: 787382 - protein, 16 aa, Homo sapiens
  CDR3 for beta chain variable domain of TCR clone 393691 (TRBV18, TRBJ1-5)
CASSPYRVEGNQPKHF

SEQ ID NO: 787383 - protein, 13 aa, Homo sapiens
  CDR3 for alpha chain variable domain of TCR clone 393692 (TRAV17, TRAJ9)
CATDYTGGFKTIF

SEQ ID NO: 787384 - protein, 13 aa, Homo sapiens
  CDR3 for beta chain variable domain of TCR clone 393692 (TRBV20-1, TRBJ1-1)
CSARGGGNTEAFF

SEQ ID NO: 787385 - protein, 22 aa, Homo sapiens
  CDR3 for alpha chain variable domain of TCR clone 393693 (TRAV21, )
CAVRQDAGNNHIQNPDPAVNQL

SEQ ID NO: 787386 - protein, 16 aa, Homo sapiens
  CDR3 for beta chain variable domain of TCR clone 393693 (TRBV4-2, TRBJ1-1)
CASRPLDRVGDTEAFF

SEQ ID NO: 787387 - protein, 11 aa, Homo sapiens
  CDR3 for alpha chain variable domain of TCR clone 393694 (TRAV12-3, TRAJ43)
CAMSVSNDMRF

SEQ ID NO: 787388 - protein, 18 aa, Homo sapiens
  CDR3 for beta chain variable domain of TCR clone 393694 (TRBV11-2, TRBJ2-3)
CASSLGGASRGAPNTQYF

SEQ ID NO: 787389 - protein, 21 aa, Homo sapiens
  CDR3 for alpha chain variable domain of TCR clone 393695 (TRAV1-2, TRAJ37)
CLLPLCCERFHGSGNTGKLIF

SEQ ID NO: 787390 - protein, 14 aa, Homo sapiens
  CDR3 for beta chain variable domain of TCR clone 393695 (TRBV2, TRBJ2-5)
CANSEVLAQETQYF

SEQ ID NO: 787391 - protein, 15 aa, Homo sapiens
  CDR3 for alpha chain variable domain of TCR clone 393696 (TRAV3, TRAJ5)
CAVRDRKTGMRALTF

SEQ ID NO: 787392 - protein, 16 aa, Homo sapiens
  CDR3 for beta chain variable domain of TCR clone 393696 (TRBV20-1, TRBJ2-6)
CSASSQGYDGANVLTF

SEQ ID NO: 787393 - protein, 12 aa, Homo sapiens
  CDR3 for alpha chain variable domain of TCR clone 393697 (TRAV27, TRAJ9)
CAGNTGGFKTIF

SEQ ID NO: 787394 - protein, 16 aa, Homo sapiens
  CDR3 for beta chain variable domain of TCR clone 393697 (TRBV18, TRBJ2-1)
CASSPYLSIRGDEQFL

SEQ ID NO: 787395 - protein, 11 aa, Homo sapiens
  CDR3 for alpha chain variable domain of TCR clone 393698 (TRAV13-2, TRAJ23)
CAESPRGKLIF

SEQ ID NO: 787396 - protein, 20 aa, Homo sapiens
  CDR3 for beta chain variable domain of TCR clone 393698 (TRBV7-8, TRBJ2-2)
CASSHLFPGPTIHITGELFF

SEQ ID NO: 787397 - protein, 14 aa, Homo sapiens
  CDR3 for alpha chain variable domain of TCR clone 393699 (TRAV13-2, TRAJ6)
CRGGPSGGSYIPTF

SEQ ID NO: 787398 - protein, 13 aa, Homo sapiens
  CDR3 for beta chain variable domain of TCR clone 393699 (TRBV9, TRBJ2-7)
CASSVAEYYEQYL

SEQ ID NO: 787399 - protein, 14 aa, Homo sapiens
  CDR3 for alpha chain variable domain of TCR clone 393700 (TRAV13-1, TRAJ9)
CAASALTGGFKTIF

SEQ ID NO: 787400 - protein, 16 aa, Homo sapiens
  CDR3 for beta chain variable domain of TCR clone 393700 (TRBV28, TRBJ2-7)
CASSSPQGRDVYEQYF

SEQ ID NO: 787401 - protein, 20 aa, Homo sapiens
  CDR3 for alpha chain variable domain of TCR clone 393701 (TRAV26-1, TRAJ52)
CCVLLHRPSAGGTSYGKLPF

SEQ ID NO: 787402 - protein, 14 aa, Homo sapiens
  CDR3 for beta chain variable domain of TCR clone 393701 (TRBV7-2, TRBJ1-4)
CASSHSKTNEKLFF

SEQ ID NO: 787403 - protein, 12 aa, Homo sapiens
  CDR3 for alpha chain variable domain of TCR clone 393702 (TRAV1-2, TRAJ29)
CAVPSGNTPVVF

SEQ ID NO: 787404 - protein, 13 aa, Homo sapiens
  CDR3 for beta chain variable domain of TCR clone 393702 (TRBV5-4, TRBJ1-1)
CASSVDLGTETFF

SEQ ID NO: 787405 - protein, 12 aa, Homo sapiens
  CDR3 for alpha chain variable domain of TCR clone 393703 (TRAV26-1, TRAJ17)
CISQSCRQQANF

SEQ ID NO: 787406 - protein, 16 aa, Homo sapiens
  CDR3 for beta chain variable domain of TCR clone 393703 (TRBV28, TRBJ1-4)
CASSSRTGAANEELFF

SEQ ID NO: 787407 - protein, 13 aa, Homo sapiens
  CDR3 for alpha chain variable domain of TCR clone 393704 (TRAV20, TRAJ48)
CAVHLFGNEKLTF

SEQ ID NO: 787408 - protein, 15 aa, Homo sapiens
  CDR3 for beta chain variable domain of TCR clone 393704 (TRBV6-5, TRBJ2-6)
CAGSQWEAGANVLTF

SEQ ID NO: 787409 - protein, 11 aa, Homo sapiens
  CDR3 for alpha chain variable domain of TCR clone 393705 (TRAV3, TRAJ21)
CAVGNFNKFYF

SEQ ID NO: 787410 - protein, 13 aa, Homo sapiens
  CDR3 for beta chain variable domain of TCR clone 393705 (TRBV2, TRBJ1-1)
CASRWTVNTEAFF

SEQ ID NO: 787411 - protein, 17 aa, Homo sapiens
  CDR3 for alpha chain variable domain of TCR clone 393706 (TRAV8-3, TRAJ52)
CCGCDPPGDYSYGKLTF

SEQ ID NO: 787412 - protein, 18 aa, Homo sapiens
  CDR3 for beta chain variable domain of TCR clone 393706 (TRBV11-2, TRBJ2-6)
CASSLNPFLGTGANVLAF

SEQ ID NO: 787413 - protein, 13 aa, Homo sapiens
  CDR3 for alpha chain variable domain of TCR clone 393707 (TRAV23/DV6, TRAJ15)
CAALPDGRNCSDL

SEQ ID NO: 787414 - protein, 14 aa, Homo sapiens
  CDR3 for beta chain variable domain of TCR clone 393707 (TRBV7-9, TRBJ1-2)
CASSRQGANYGYTF

SEQ ID NO: 787415 - protein, 13 aa, Homo sapiens
  CDR3 for alpha chain variable domain of TCR clone 393708 (TRAV13-1, TRAJ21)
CAASIYNFNKFYF

SEQ ID NO: 787416 - protein, 13 aa, Homo sapiens
  CDR3 for beta chain variable domain of TCR clone 393708 (TRBV6-1, TRBJ1-5)
CASSGDRVRSQHF

SEQ ID NO: 787417 - protein, 12 aa, Homo sapiens
  CDR3 for alpha chain variable domain of TCR clone 393709 (TRAV36/DV7, TRAJ42)
CASGGSQGNLIF

SEQ ID NO: 787418 - protein, 15 aa, Homo sapiens
  CDR3 for beta chain variable domain of TCR clone 393709 (TRBV6-5, TRBJ2-7)
CASSYSTSGNYEQYF

SEQ ID NO: 787419 - protein, 16 aa, Homo sapiens
  CDR3 for alpha chain variable domain of TCR clone 393710 (TRAV30, TRAJ24)
CGTEIVDADSWGKFHF

SEQ ID NO: 787420 - protein, 14 aa, Homo sapiens
  CDR3 for beta chain variable domain of TCR clone 393710 (TRBV7-2, TRBJ2-7)
CASSPKTSFYEQYF

SEQ ID NO: 787421 - protein, 14 aa, Homo sapiens
  CDR3 for alpha chain variable domain of TCR clone 393711 (TRAV12-1, TRAJ17)
CVVNYKAAGNKLTF

SEQ ID NO: 787422 - protein, 14 aa, Homo sapiens
  CDR3 for beta chain variable domain of TCR clone 393711 (TRBV7-8, TRBJ2-3)
CASSLEAGTNTQYF

SEQ ID NO: 787423 - protein, 13 aa, Homo sapiens
  CDR3 for alpha chain variable domain of TCR clone 393712 (TRAV2, TRAJ29)
CAEQNSGNSPLVF

SEQ ID NO: 787424 - protein, 13 aa, Homo sapiens
  CDR3 for beta chain variable domain of TCR clone 393712 (TRBV28, TRBJ1-2)
CASSPGNRNGYTF

SEQ ID NO: 787425 - protein, 14 aa, Homo sapiens
  CDR3 for alpha chain variable domain of TCR clone 393713 (TRAV13-2, TRAJ43)
CAEFPTYNNNDMRF

SEQ ID NO: 787426 - protein, 15 aa, Homo sapiens
  CDR3 for beta chain variable domain of TCR clone 393713 (TRBV7-9, TRBJ2-2)
CASGPLDTFPGELFF

SEQ ID NO: 787427 - protein, 12 aa, Homo sapiens
  CDR3 for alpha chain variable domain of TCR clone 393714 (TRAV13-1, TRAJ11)
CAGHSGYSTLTF

SEQ ID NO: 787428 - protein, 13 aa, Homo sapiens
  CDR3 for beta chain variable domain of TCR clone 393714 (TRBV12-4, TRBJ2-1)
CASSLSPSNEQFF

SEQ ID NO: 787429 - protein, 21 aa, Homo sapiens
  CDR3 for alpha chain variable domain of TCR clone 393715 (TRAV29/DV5, TRAJ52)
CSVLLCSKREAGGTSCGKLTF

SEQ ID NO: 787430 - protein, 13 aa, Homo sapiens
  CDR3 for beta chain variable domain of TCR clone 393715 (TRBV27, TRBJ1-4)
CASSLMGDEKLFF

SEQ ID NO: 787431 - protein, 14 aa, Homo sapiens
  CDR3 for alpha chain variable domain of TCR clone 393716 (TRAV26-1, TRAJ44)
CIARTTGTASKLTF

SEQ ID NO: 787432 - protein, 16 aa, Homo sapiens
  CDR3 for beta chain variable domain of TCR clone 393716 (TRBV19, TRBJ1-1)
CASRVDVTGAAWGAFF

SEQ ID NO: 787433 - protein, 15 aa, Homo sapiens
  CDR3 for alpha chain variable domain of TCR clone 393717 (TRAV12-3, TRAJ49)
CAMAVTPNTGNKFYF

SEQ ID NO: 787434 - protein, 18 aa, Homo sapiens
  CDR3 for beta chain variable domain of TCR clone 393717 (TRBV4-1, TRBJ1-5)
CASSQAPRGQGLNQPQHF

SEQ ID NO: 787435 - protein, 15 aa, Homo sapiens
  CDR3 for alpha chain variable domain of TCR clone 393718 (TRAV3, TRAJ22)
CAVRDRGGSAGQLTF

SEQ ID NO: 787436 - protein, 13 aa, Homo sapiens
  CDR3 for beta chain variable domain of TCR clone 393718 (TRBV2, TRBJ1-5)
CATAGPGNQPQHF

SEQ ID NO: 787437 - protein, 16 aa, Homo sapiens
  CDR3 for alpha chain variable domain of TCR clone 393719 (TRAV3, TRAJ37)
CAVRGKGAGNTGKLIF

SEQ ID NO: 787438 - protein, 15 aa, Homo sapiens
  CDR3 for beta chain variable domain of TCR clone 393719 (TRBV7-9, TRBJ2-2)
CASGPLDTFPGELVF

SEQ ID NO: 787439 - protein, 15 aa, Homo sapiens
  CDR3 for alpha chain variable domain of TCR clone 393720 (TRAV12-3, TRAJ49)
CAMAVTPNTGNQFYS

SEQ ID NO: 787440 - protein, 14 aa, Homo sapiens
  CDR3 for beta chain variable domain of TCR clone 393720 (TRBV7-8, TRBJ2-3)
CASSLEAGTDTQYF

SEQ ID NO: 787441 - protein, 18 aa, Homo sapiens
  CDR3 for alpha chain variable domain of TCR clone 393721 (TRAV12-3, TRAJ52)
CAMSVGGAGGTSYGKLTF

SEQ ID NO: 787442 - protein, 16 aa, Homo sapiens
  CDR3 for beta chain variable domain of TCR clone 393721 (TRBV7-9, TRBJ1-2)
CASSISLDRGGYGYIF

SEQ ID NO: 787443 - protein, 18 aa, Homo sapiens
  CDR3 for alpha chain variable domain of TCR clone 393722 (TRAV21, TRAJ52)
CAVRPSPAGGTSYGKLTF

SEQ ID NO: 787444 - protein, 13 aa, Homo sapiens
  CDR3 for beta chain variable domain of TCR clone 393722 (TRBV4-2, TRBJ2-3)
CASSLTTTDTQYF

SEQ ID NO: 787445 - protein, 14 aa, Homo sapiens
  CDR3 for alpha chain variable domain of TCR clone 393723 (TRAV12-1, TRAJ45)
GVVNVGGGADGLTF

SEQ ID NO: 787446 - protein, 14 aa, Homo sapiens
  CDR3 for beta chain variable domain of TCR clone 393723 (TRBV29-1, TRBJ2-3)
CSVEPGTRTDTQYF

SEQ ID NO: 787447 - protein, 15 aa, Homo sapiens
  CDR3 for alpha chain variable domain of TCR clone 393724 (TRAV27, TRAJ38)
CAARRNAGNNRKLSW

SEQ ID NO: 787448 - protein, 13 aa, Homo sapiens
  CDR3 for beta chain variable domain of TCR clone 393724 (TRBV12-5, TRBJ2-3)
CASGERQSDTQYF

SEQ ID NO: 787449 - protein, 13 aa, Homo sapiens
  CDR3 for alpha chain variable domain of TCR clone 393725 (TRAV13-1, TRAJ9)
CAARGTGGFKPIF

SEQ ID NO: 787450 - protein, 12 aa, Homo sapiens
  CDR3 for beta chain variable domain of TCR clone 393725 (TRBV2, TRBJ2-1)
CAYGPPGNEQFF

SEQ ID NO: 787451 - protein, 14 aa, Homo sapiens
  CDR3 for alpha chain variable domain of TCR clone 393726 (TRAV4, TRAJ26)
CRVGPHNYGQNFVF

SEQ ID NO: 787452 - protein, 17 aa, Homo sapiens
  CDR3 for beta chain variable domain of TCR clone 393726 (TRBV24-1, TRBJ2-1)
WATSDVSTSGTYNEQFF

SEQ ID NO: 787453 - protein, 15 aa, Homo sapiens
  CDR3 for alpha chain variable domain of TCR clone 393727 (TRAV12-3, TRAJ6)
CAMSATTGGSYIPTF

SEQ ID NO: 787454 - protein, 17 aa, Homo sapiens
  CDR3 for beta chain variable domain of TCR clone 393727 (TRBV20-1, TRBJ2-1)
CSAGSPSGGPPTMSSSS

SEQ ID NO: 787455 - protein, 14 aa, Homo sapiens
  CDR3 for alpha chain variable domain of TCR clone 393728 (TRAV1-2, TRAJ16)
CAVNRFSDGQKLLF

SEQ ID NO: 787456 - protein, 16 aa, Homo sapiens
  CDR3 for beta chain variable domain of TCR clone 393728 (TRBV12-4, TRBJ2-1)
CASSAGGQGNGDEQFF

SEQ ID NO: 787457 - protein, 15 aa, Homo sapiens
  CDR3 for alpha chain variable domain of TCR clone 393729 (TRAV3, TRAJ17)
CAVSPKEAAGNKLTF

SEQ ID NO: 787458 - protein, 12 aa, Homo sapiens
  CDR3 for beta chain variable domain of TCR clone 393729 (TRBV7-9, TRBJ1-6)
CASSLMTSPLDF

SEQ ID NO: 787459 - protein, 10 aa, Homo sapiens
  CDR3 for alpha chain variable domain of TCR clone 393730 (TRAV13-1, TRAJ30)
CAARDDKNIF

SEQ ID NO: 787460 - protein, 15 aa, Homo sapiens
  CDR3 for beta chain variable domain of TCR clone 393730 (TRBV9, TRBJ1-6)
CASSVAGTGDSPLHF

SEQ ID NO: 787461 - protein, 14 aa, Homo sapiens
  CDR3 for alpha chain variable domain of TCR clone 393731 (TRAV13-1, TRAJ40)
CSARSTSGTYRYIF

SEQ ID NO: 787462 - protein, 15 aa, Homo sapiens
  CDR3 for beta chain variable domain of TCR clone 393731 (TRBV18, TRBJ1-5)
CASSEAGGNNQPQHF

SEQ ID NO: 787463 - protein, 15 aa, Homo sapiens
  CDR3 for alpha chain variable domain of TCR clone 393732 (TRAV26-2, TRAJ26)
CILRDFDNYCQNFVF

SEQ ID NO: 787464 - protein, 14 aa, Homo sapiens
  CDR3 for beta chain variable domain of TCR clone 393732 (TRBV29-1, TRBJ2-5)
CSFWTPYAGETQYF

SEQ ID NO: 787465 - protein, 14 aa, Homo sapiens
  CDR3 for alpha chain variable domain of TCR clone 393733 (TRAV14/DV4, TRAJ26)
CAMREGTYGQNFVF

SEQ ID NO: 787466 - protein, 16 aa, Homo sapiens
  CDR3 for beta chain variable domain of TCR clone 393733 (TRBV9, TRBJ1-2)
CASSVEEEVSPYGYTF

SEQ ID NO: 787467 - protein, 17 aa, Homo sapiens
  CDR3 for alpha chain variable domain of TCR clone 393734 (TRAV36/DV7, TRAJ52)
CAVAQRAGGTSYGKLTF

SEQ ID NO: 787468 - protein, 14 aa, Homo sapiens
  CDR3 for beta chain variable domain of TCR clone 393734 (TRBV19, TRBJ2-1)
CASPTFVLSGEQLF

SEQ ID NO: 787469 - protein, 14 aa, Homo sapiens
  CDR3 for alpha chain variable domain of TCR clone 393735 (TRAV8-3, TRAJ35)
CAVAPQGFGNVLHC

SEQ ID NO: 787470 - protein, 15 aa, Homo sapiens
  CDR3 for beta chain variable domain of TCR clone 393735 (TRBV6-1, TRBJ2-2)
CASSAGQGYTGELFF

SEQ ID NO: 787471 - protein, 18 aa, Homo sapiens
  CDR3 for alpha chain variable domain of TCR clone 393736 (TRAV26-1, TRAJ23)
CIVRVGLEGWNQGGKLIF

SEQ ID NO: 787472 - protein, 13 aa, Homo sapiens
  CDR3 for beta chain variable domain of TCR clone 393736 (TRBV7-2, TRBJ2-7)
CASILSGRSGLAG

SEQ ID NO: 787473 - protein, 15 aa, Homo sapiens
  CDR3 for alpha chain variable domain of TCR clone 393737 (TRAV12-2, TRAJ53)
CAVNGGGGSNYKLTF

SEQ ID NO: 787474 - protein, 14 aa, Homo sapiens
  CDR3 for beta chain variable domain of TCR clone 393737 (TRBV19, TRBJ2-1)
CGSPTFVLSGEQFF

SEQ ID NO: 787475 - protein, 14 aa, Homo sapiens
  CDR3 for alpha chain variable domain of TCR clone 393738 (TRAV8-3, TRAJ4)
CAVGAAGGYNKLIF

SEQ ID NO: 787476 - protein, 15 aa, Homo sapiens
  CDR3 for beta chain variable domain of TCR clone 393738 (TRBV7-2, TRBJ1-2)
CASSPRAGWNYGYTF

SEQ ID NO: 787477 - protein, 14 aa, Homo sapiens
  CDR3 for alpha chain variable domain of TCR clone 393739 (TRAV3, TRAJ34)
CAVRDLNNTDKLIF

SEQ ID NO: 787478 - protein, 14 aa, Homo sapiens
  CDR3 for beta chain variable domain of TCR clone 393739 (TRBV7-2, TRBJ2-2)
CASSLGQNTGELFF

SEQ ID NO: 787479 - protein, 12 aa, Homo sapiens
  CDR3 for alpha chain variable domain of TCR clone 393740 (TRAV12-3, TRAJ42)
CAPGGSQGNLLF

SEQ ID NO: 787480 - protein, 13 aa, Homo sapiens
  CDR3 for beta chain variable domain of TCR clone 393740 (TRBV5-6, TRBJ2-6)
CASTSSGANVLTF

SEQ ID NO: 787481 - protein, 14 aa, Homo sapiens
  CDR3 for alpha chain variable domain of TCR clone 393741 (TRAV12-3, TRAJ9)
CAMSPNTGGFKTIF

SEQ ID NO: 787482 - protein, 15 aa, Homo sapiens
  CDR3 for beta chain variable domain of TCR clone 393741 (TRBV28, TRBJ2-4)
CAAGSGTLLMGIQYF

SEQ ID NO: 787483 - protein, 16 aa, Homo sapiens
  CDR3 for alpha chain variable domain of TCR clone 393742 (TRAV1-2, TRAJ16)
CAVNRFSDARSCSLQG

SEQ ID NO: 787484 - protein, 12 aa, Homo sapiens
  CDR3 for beta chain variable domain of TCR clone 393742 (TRBV11-2, TRBJ2-1)
CASSPGNNEQFF

SEQ ID NO: 787485 - protein, 11 aa, Homo sapiens
  CDR3 for alpha chain variable domain of TCR clone 393743 (TRAV1-2, TRAJ20)
CAVANDYKLSF

SEQ ID NO: 787486 - protein, 14 aa, Homo sapiens
  CDR3 for beta chain variable domain of TCR clone 393743 (TRBV7-2, TRBJ2-7)
CASSTKTSFYEQYF

SEQ ID NO: 787487 - protein, 15 aa, Homo sapiens
  CDR3 for alpha chain variable domain of TCR clone 393744 (TRAV34, TRAJ38)
CGADFTPGNNRKLIW

SEQ ID NO: 787488 - protein, 14 aa, Homo sapiens
  CDR3 for beta chain variable domain of TCR clone 393744 (TRBV2, TRBJ2-7)
CASSLTSGGYEQYF

SEQ ID NO: 787489 - protein, 11 aa, Homo sapiens
  CDR3 for alpha chain variable domain of TCR clone 393745 (TRAV1-1, TRAJ23)
CAVRQGGRLSF

SEQ ID NO: 787490 - protein, 20 aa, Homo sapiens
  CDR3 for beta chain variable domain of TCR clone 393745 (TRBV7-8, TRBJ2-2)
CASSHLFPGPTIHITGELFF

SEQ ID NO: 787491 - protein, 13 aa, Homo sapiens
  CDR3 for alpha chain variable domain of TCR clone 393746 (TRAV8-6, TRAJ49)
CAVITNTGNHFYF

SEQ ID NO: 787492 - protein, 14 aa, Homo sapiens
  CDR3 for beta chain variable domain of TCR clone 393746 (TRBV5-1, TRBJ2-7)
CASSRGESLYEQYF

SEQ ID NO: 787493 - protein, 15 aa, Homo sapiens
  CDR3 for alpha chain variable domain of TCR clone 393747 (TRAV12-2, TRAJ9)
CAVNNERTGGFTTIF

SEQ ID NO: 787494 - protein, 14 aa, Homo sapiens
  CDR3 for beta chain variable domain of TCR clone 393747 (TRBV4-1, TRBJ1-4)
CASSQERKNEKLFF

SEQ ID NO: 787495 - protein, 17 aa, Homo sapiens
  CDR3 for alpha chain variable domain of TCR clone 393748 (TRAV8-6, TRAJ58)
CAVSSWVGETSGSRLTF

SEQ ID NO: 787496 - protein, 12 aa, Homo sapiens
  CDR3 for beta chain variable domain of TCR clone 393748 (TRBV3-1, TRBJ2-1)
CASGGLGNEQFF

SEQ ID NO: 787497 - protein, 14 aa, Homo sapiens
  CDR3 for alpha chain variable domain of TCR clone 393749 (TRAV20, TRAJ22)
CAVALGGSARQLTF

SEQ ID NO: 787498 - protein, 11 aa, Homo sapiens
  CDR3 for beta chain variable domain of TCR clone 393749 (TRBV12-4, TRBJ2-3)
CASTATDTQYF

SEQ ID NO: 787499 - protein, 18 aa, Homo sapiens
  CDR3 for alpha chain variable domain of TCR clone 393750 (TRAV21, TRAJ52)
CAVRPSPASGTSYGKLTF

SEQ ID NO: 787500 - protein, 16 aa, Homo sapiens
  CDR3 for beta chain variable domain of TCR clone 393750 (TRBV15, TRBJ2-3)
CATSRDLGIVTDTQYF

SEQ ID NO: 787501 - protein, 12 aa, Homo sapiens
  CDR3 for alpha chain variable domain of TCR clone 393751 (TRAV13-1, TRAJ49)
CAASPMGNQFYF

SEQ ID NO: 787502 - protein, 17 aa, Homo sapiens
  CDR3 for beta chain variable domain of TCR clone 393751 (TRBV11-2, TRBJ2-1)
CASSLFPPGVEYNEQFF

SEQ ID NO: 787503 - protein, 14 aa, Homo sapiens
  CDR3 for alpha chain variable domain of TCR clone 393752 (TRAV26-1, TRAJ34)
CIVRESYNTDKLIF

SEQ ID NO: 787504 - protein, 13 aa, Homo sapiens
  CDR3 for beta chain variable domain of TCR clone 393752 (TRBV7-9, TRBJ2-1)
CASSLDVGNEQFF

SEQ ID NO: 787505 - protein, 13 aa, Homo sapiens
  CDR3 for alpha chain variable domain of TCR clone 393753 (TRAV2, TRAJ40)
CAVVTSGTYKYIF

SEQ ID NO: 787506 - protein, 15 aa, Homo sapiens
  CDR3 for beta chain variable domain of TCR clone 393753 (TRBV11-3, TRBJ2-3)
CASLKDGREGDTQNF

SEQ ID NO: 787507 - protein, 17 aa, Homo sapiens
  CDR3 for alpha chain variable domain of TCR clone 393754 (TRAV8-3, TRAJ50)
CAVGAVDTETSYNKVIF

SEQ ID NO: 787508 - protein, 13 aa, Homo sapiens
  CDR3 for beta chain variable domain of TCR clone 393754 (TRBV7-9, TRBJ2-2)
CASSSAGTGELFF

SEQ ID NO: 787509 - protein, 18 aa, Homo sapiens
  CDR3 for alpha chain variable domain of TCR clone 393755 (TRAV26-2, TRAJ45)
CILRLWGYSGGGADGLTF

SEQ ID NO: 787510 - protein, 15 aa, Homo sapiens
  CDR3 for beta chain variable domain of TCR clone 393755 (TRBV3-1, TRBJ2-1)
CASSQQPSGGNEQFF

SEQ ID NO: 787511 - protein, 14 aa, Homo sapiens
  CDR3 for alpha chain variable domain of TCR clone 393756 (TRAV12-2, TRAJ4)
CAVLIGGGYNKLIF

SEQ ID NO: 787512 - protein, 11 aa, Homo sapiens
  CDR3 for beta chain variable domain of TCR clone 393756 (TRBV7-8, TRBJ2-7)
CASSLSLEQYF

SEQ ID NO: 787513 - protein, 16 aa, Homo sapiens
  CDR3 for alpha chain variable domain of TCR clone 393757 (TRAV3, TRAJ21)
CAVRDIERGNLNKFYF

SEQ ID NO: 787514 - protein, 13 aa, Homo sapiens
  CDR3 for beta chain variable domain of TCR clone 393757 (TRBV28, TRBJ2-5)
CASSSRNQETQYF

SEQ ID NO: 787515 - protein, 14 aa, Homo sapiens
  CDR3 for alpha chain variable domain of TCR clone 393758 (TRAV21, TRAJ35)
CAVMPIGFGNVLHC

SEQ ID NO: 787516 - protein, 12 aa, Homo sapiens
  CDR3 for beta chain variable domain of TCR clone 393758 (TRBV5-7, TRBJ1-1)
CASSLGRGKAFF

SEQ ID NO: 787517 - protein, 12 aa, Homo sapiens
  CDR3 for alpha chain variable domain of TCR clone 393759 (TRAV13-1, TRAJ49)
CAASPMGNQFYF

SEQ ID NO: 787518 - protein, 17 aa, Homo sapiens
  CDR3 for beta chain variable domain of TCR clone 393759 (TRBV11-2, TRBJ2-1)
CASSLYPPGFEYNEQFF

SEQ ID NO: 787519 - protein, 14 aa, Homo sapiens
  CDR3 for alpha chain variable domain of TCR clone 393760 (TRAV3, TRAJ22)
CAVRDYGSARQLTF

SEQ ID NO: 787520 - protein, 14 aa, Homo sapiens
  CDR3 for beta chain variable domain of TCR clone 393760 (TRBV7-9, TRBJ2-3)
CASSLEDGTDTQYF

SEQ ID NO: 787521 - protein, 17 aa, Homo sapiens
  CDR3 for alpha chain variable domain of TCR clone 393761 (TRAV23/DV6, TRAJ57)
CEASSTLSQSGSEKLVF

SEQ ID NO: 787522 - protein, 14 aa, Homo sapiens
  CDR3 for beta chain variable domain of TCR clone 393761 (TRBV25-1, TRBJ1-1)
CASTHLGGNTEAFF

SEQ ID NO: 787523 - protein, 15 aa, Homo sapiens
  CDR3 for alpha chain variable domain of TCR clone 393762 (TRAV2, TRAJ9)
CAVAALNTGGFKTIF

SEQ ID NO: 787524 - protein, 11 aa, Homo sapiens
  CDR3 for beta chain variable domain of TCR clone 393762 (TRBV20-1, TRBJ2-3)
CSGTRSTTQYF

SEQ ID NO: 787525 - protein, 12 aa, Homo sapiens
  CDR3 for alpha chain variable domain of TCR clone 393763 (TRAV21, TRAJ31)
CVLAGNNARLMF

SEQ ID NO: 787526 - protein, 15 aa, Homo sapiens
  CDR3 for beta chain variable domain of TCR clone 393763 (TRBV7-2, TRBJ2-7)
CASSLAVGQVYEQYF

SEQ ID NO: 787527 - protein, 14 aa, Homo sapiens
  CDR3 for alpha chain variable domain of TCR clone 393764 (TRAV12-2, TRAJ13)
CAVKKTGGYQKVTF

SEQ ID NO: 787528 - protein, 13 aa, Homo sapiens
  CDR3 for beta chain variable domain of TCR clone 393764 (TRBV7-2, TRBJ1-4)
CASSLAGLEKLFF

SEQ ID NO: 787529 - protein, 11 aa, Homo sapiens
  CDR3 for alpha chain variable domain of TCR clone 393765 (TRAV12-1, TRAJ8)
CVVTGFQKLAF

SEQ ID NO: 787530 - protein, 14 aa, Homo sapiens
  CDR3 for beta chain variable domain of TCR clone 393765 (TRBV19, TRBJ2-1)
CASGKSTQYKEQFF

SEQ ID NO: 787531 - protein, 15 aa, Homo sapiens
  CDR3 for alpha chain variable domain of TCR clone 393766 (TRAV12-1, TRAJ4)
FVVNPFSGGYTKLIF

SEQ ID NO: 787532 - protein, 16 aa, Homo sapiens
  CDR3 for beta chain variable domain of TCR clone 393766 (TRBV5-1, TRBJ1-1)
CASSKTGTEVGTEAFF

SEQ ID NO: 787533 - protein, 14 aa, Homo sapiens
  CDR3 for alpha chain variable domain of TCR clone 393767 (TRAV12-2, TRAJ13)
CAVKKTGGYQKVTF

SEQ ID NO: 787534 - protein, 14 aa, Homo sapiens
  CDR3 for beta chain variable domain of TCR clone 393767 (TRBV18, TRBJ1-2)
CASSPDRVAYGYTF

SEQ ID NO: 787535 - protein, 14 aa, Homo sapiens
  CDR3 for alpha chain variable domain of TCR clone 393768 (TRAV12-3, TRAJ10)
SHLPLTGGGNKLTF

SEQ ID NO: 787536 - protein, 15 aa, Homo sapiens
  CDR3 for beta chain variable domain of TCR clone 393768 (TRBV11-2, TRBJ2-7)
CASRFPGTGGYEQYF

SEQ ID NO: 787537 - protein, 14 aa, Homo sapiens
  CDR3 for alpha chain variable domain of TCR clone 393769 (TRAV35, TRAJ22)
CAGLRPGLARQLTF

SEQ ID NO: 787538 - protein, 13 aa, Homo sapiens
  CDR3 for beta chain variable domain of TCR clone 393769 (TRBV20-1, TRBJ1-1)
CSARGGGNTEAFF

SEQ ID NO: 787539 - protein, 13 aa, Homo sapiens
  CDR3 for alpha chain variable domain of TCR clone 393770 (TRAV8-3, TRAJ28)
CAVGAVGSYQLTF

SEQ ID NO: 787540 - protein, 16 aa, Homo sapiens
  CDR3 for beta chain variable domain of TCR clone 393770 (TRBV7-2, TRBJ2-7)
CASRSQGAASSSTSGR

SEQ ID NO: 787541 - protein, 14 aa, Homo sapiens
  CDR3 for alpha chain variable domain of TCR clone 393771 (TRAV16, TRAJ22)
CALRGQGSARQLTF

SEQ ID NO: 787542 - protein, 14 aa, Homo sapiens
  CDR3 for beta chain variable domain of TCR clone 393771 (TRBV7-2, TRBJ2-1)
CASSLVAGRNEQFF

SEQ ID NO: 787543 - protein, 13 aa, Homo sapiens
  CDR3 for alpha chain variable domain of TCR clone 393772 (TRAV21, TRAJ27)
CAARPGNAGKSTL

SEQ ID NO: 787544 - protein, 14 aa, Homo sapiens
  CDR3 for beta chain variable domain of TCR clone 393772 (TRBV7-6, TRBJ2-3)
CASSLGTVRDTQYF

SEQ ID NO: 787545 - protein, 14 aa, Homo sapiens
  CDR3 for alpha chain variable domain of TCR clone 393773 (TRAV38-1, TRAJ45)
CASHSGGGADGLPF

SEQ ID NO: 787546 - protein, 14 aa, Homo sapiens
  CDR3 for beta chain variable domain of TCR clone 393773 (TRBV23-1, TRBJ2-5)
CASSFLRSQETQYF

SEQ ID NO: 787547 - protein, 13 aa, Homo sapiens
  CDR3 for alpha chain variable domain of TCR clone 393774 (TRAV23/DV6, TRAJ34)
CAAIENNTDKLIF

SEQ ID NO: 787548 - protein, 18 aa, Homo sapiens
  CDR3 for beta chain variable domain of TCR clone 393774 (TRBV20-1, TRBJ2-6)
CSAETTPTRGSGANVLTF

SEQ ID NO: 787549 - protein, 13 aa, Homo sapiens
  CDR3 for alpha chain variable domain of TCR clone 393775 (TRAV3, TRAJ20)
CAVRSLNDYKISF

SEQ ID NO: 787550 - protein, 13 aa, Homo sapiens
  CDR3 for beta chain variable domain of TCR clone 393775 (TRBV7-3, TRBJ1-1)
CASSQDWGAEAFF

SEQ ID NO: 787551 - protein, 13 aa, Homo sapiens
  CDR3 for alpha chain variable domain of TCR clone 393776 (TRAV36/DV7, TRAJ49)
CAVEANTGNQFYF

SEQ ID NO: 787552 - protein, 15 aa, Homo sapiens
  CDR3 for beta chain variable domain of TCR clone 393776 (TRBV20-1, TRBJ2-7)
CSARDRVSGMDEQYF

SEQ ID NO: 787553 - protein, 14 aa, Homo sapiens
  CDR3 for alpha chain variable domain of TCR clone 393777 (TRAV22, TRAJ29)
CAVTRNSGNTHLVF

SEQ ID NO: 787554 - protein, 13 aa, Homo sapiens
  CDR3 for beta chain variable domain of TCR clone 393777 (TRBV18, TRBJ1-1)
CASSPETKPEAFF

SEQ ID NO: 787555 - protein, 16 aa, Homo sapiens
  CDR3 for alpha chain variable domain of TCR clone 393778 (TRAV30, TRAJ24)
CGTEIVDADSWGKFQF

SEQ ID NO: 787556 - protein, 16 aa, Homo sapiens
  CDR3 for beta chain variable domain of TCR clone 393778 (TRBV2, TRBJ1-3)
CASSGVAGRSGNTIYF

SEQ ID NO: 787557 - protein, 18 aa, Homo sapiens
  CDR3 for alpha chain variable domain of TCR clone 393779 (TRAV26-1, TRAJ23)
CIVRVGLEVWNQGGKLIF

SEQ ID NO: 787558 - protein, 14 aa, Homo sapiens
  CDR3 for beta chain variable domain of TCR clone 393779 (TRBV7-6, TRBJ2-3)
CASSLGTVTDTQYC

SEQ ID NO: 787559 - protein, 16 aa, Homo sapiens
  CDR3 for alpha chain variable domain of TCR clone 393780 (TRAV3, TRAJ10)
CAVRDMRAGVGNKLTF

SEQ ID NO: 787560 - protein, 14 aa, Homo sapiens
  CDR3 for beta chain variable domain of TCR clone 393780 (TRBV11-2, TRBJ2-7)
CASSSTGEGYEQYF

SEQ ID NO: 787561 - protein, 13 aa, Homo sapiens
  CDR3 for alpha chain variable domain of TCR clone 393781 (TRAV21, TRAJ20)
CAVGLRVDYKLSF

SEQ ID NO: 787562 - protein, 14 aa, Homo sapiens
  CDR3 for beta chain variable domain of TCR clone 393781 (TRBV7-2, TRBJ1-5)
CASSRDGSNQPQHF

SEQ ID NO: 787563 - protein, 16 aa, Homo sapiens
  CDR3 for alpha chain variable domain of TCR clone 393782 (TRAV3, TRAJ37)
CAVGGKGSGNTGNLIF

SEQ ID NO: 787564 - protein, 12 aa, Homo sapiens
  CDR3 for beta chain variable domain of TCR clone 393782 (TRBV12-4, TRBJ2-3)
CASSTLPDTQYF

SEQ ID NO: 787565 - protein, 14 aa, Homo sapiens
  CDR3 for alpha chain variable domain of TCR clone 393783 (TRAV3, TRAJ17)
CAVRERSCRQQANF

SEQ ID NO: 787566 - protein, 17 aa, Homo sapiens
  CDR3 for beta chain variable domain of TCR clone 393783 (TRBV13, TRBJ2-3)
CASSLSRVAGGRNTQYF

SEQ ID NO: 787567 - protein, 14 aa, Homo sapiens
  CDR3 for alpha chain variable domain of TCR clone 393784 (TRAV9-2, TRAJ39)
CALYIYNSGNMLTF

SEQ ID NO: 787568 - protein, 14 aa, Homo sapiens
  CDR3 for beta chain variable domain of TCR clone 393784 (TRBV9, TRBJ2-7)
CASSPLRAVGEQYF

SEQ ID NO: 787569 - protein, 16 aa, Homo sapiens
  CDR3 for alpha chain variable domain of TCR clone 393785 (TRAV12-1, TRAJ22)
CVVNTISSGSARQLTF

SEQ ID NO: 787570 - protein, 13 aa, Homo sapiens
  CDR3 for beta chain variable domain of TCR clone 393785 (TRBV7-2, TRBJ2-7)
CASSSPSGSEQYF

SEQ ID NO: 787571 - protein, 11 aa, Homo sapiens
  CDR3 for alpha chain variable domain of TCR clone 393786 (TRAV1-2, TRAJ20)
CAVANDYKISF

SEQ ID NO: 787572 - protein, 18 aa, Homo sapiens
  CDR3 for beta chain variable domain of TCR clone 393786 (TRBV20-1, TRBJ2-6)
CSAETTPTHGSGATVLTF

SEQ ID NO: 787573 - protein, 15 aa, Homo sapiens
  CDR3 for alpha chain variable domain of TCR clone 393787 (TRAV35, TRAJ58)
CAGRRQETSGSRLTF

SEQ ID NO: 787574 - protein, 13 aa, Homo sapiens
  CDR3 for beta chain variable domain of TCR clone 393787 (TRBV7-2, TRBJ2-7)
CASSSPSGSEQYF

SEQ ID NO: 787575 - protein, 17 aa, Homo sapiens
  CDR3 for alpha chain variable domain of TCR clone 393788 (TRAV3, TRAJ38)
CAVRDCLNAGNNRKLIW

SEQ ID NO: 787576 - protein, 13 aa, Homo sapiens
  CDR3 for beta chain variable domain of TCR clone 393788 (TRBV9, TRBJ2-1)
CASSPSGGNEQFF

SEQ ID NO: 787577 - protein, 15 aa, Homo sapiens
  CDR3 for alpha chain variable domain of TCR clone 393789 (TRAV29/DV5, TRAJ24)
CAASGATNSWGKFQF

SEQ ID NO: 787578 - protein, 12 aa, Homo sapiens
  CDR3 for beta chain variable domain of TCR clone 393789 (TRBV11-2, TRBJ2-2)
CASSLPTGELFF

SEQ ID NO: 787579 - protein, 12 aa, Homo sapiens
  CDR3 for alpha chain variable domain of TCR clone 393790 (TRAV12-1, TRAJ40)
CVVSSGTYKCIF

SEQ ID NO: 787580 - protein, 14 aa, Homo sapiens
  CDR3 for beta chain variable domain of TCR clone 393790 (TRBV20-1, TRBJ2-2)
CSAPDTANTGELFF

SEQ ID NO: 787581 - protein, 10 aa, Homo sapiens
  CDR3 for alpha chain variable domain of TCR clone 393791 (TRAV2, TRAJ15)
RGPAGTALIF

SEQ ID NO: 787582 - protein, 15 aa, Homo sapiens
  CDR3 for beta chain variable domain of TCR clone 393791 (TRBV7-9, TRBJ1-1)
CASSLLEQGGTEAFF

SEQ ID NO: 787583 - protein, 22 aa, Homo sapiens
  CDR3 for alpha chain variable domain of TCR clone 393792 (TRAV8-3, TRAJ32)
CAVEVVLQTSSSLELALCLLST

SEQ ID NO: 787584 - protein, 15 aa, Homo sapiens
  CDR3 for beta chain variable domain of TCR clone 393792 (TRBV7-2, TRBJ2-1)
CASSSRTSREDEQFF

SEQ ID NO: 787585 - protein, 20 aa, Homo sapiens
  CDR3 for alpha chain variable domain of TCR clone 393793 (TRAV14/DV4, TRAJ22)
CAMREGPFSISSGSARQLTF

SEQ ID NO: 787586 - protein, 13 aa, Homo sapiens
  CDR3 for beta chain variable domain of TCR clone 393793 (TRBV4-2, TRBJ2-3)
CASSHDWQHTQYF

SEQ ID NO: 787587 - protein, 16 aa, Homo sapiens
  CDR3 for alpha chain variable domain of TCR clone 393794 (TRAV25, )
CADIQNPDPAVYQLRD

SEQ ID NO: 787588 - protein, 16 aa, Homo sapiens
  CDR3 for beta chain variable domain of TCR clone 393794 (TRBV28, TRBJ2-3)
CASSRSSGQGSDTQYF

SEQ ID NO: 787589 - protein, 13 aa, Homo sapiens
  CDR3 for alpha chain variable domain of TCR clone 393795 (TRAV8-3, TRAJ12)
WVLRMDSSSKLIF

SEQ ID NO: 787590 - protein, 17 aa, Homo sapiens
  CDR3 for beta chain variable domain of TCR clone 393795 (TRBV11-2, TRBJ2-1)
CASSLYPPGVEYNEQFF

SEQ ID NO: 787591 - protein, 12 aa, Homo sapiens
  CDR3 for alpha chain variable domain of TCR clone 393796 (TRAV17, TRAJ5)
CATMDTGRALTF

SEQ ID NO: 787592 - protein, 15 aa, Homo sapiens
  CDR3 for beta chain variable domain of TCR clone 393796 (TRBV20-1, TRBJ2-5)
CSATRTSGSLETQYF

SEQ ID NO: 787593 - protein, 13 aa, Homo sapiens
  CDR3 for alpha chain variable domain of TCR clone 393797 (TRAV17, TRAJ7)
CATDNYGNNRLAF

SEQ ID NO: 787594 - protein, 16 aa, Homo sapiens
  CDR3 for beta chain variable domain of TCR clone 393797 (TRBV4-1, TRBJ2-5)
CASNQAIAASSATQYF

SEQ ID NO: 787595 - protein, 14 aa, Homo sapiens
  CDR3 for alpha chain variable domain of TCR clone 393798 (TRAV29/DV5, TRAJ45)
CAASFRGGADGLTF

SEQ ID NO: 787596 - protein, 15 aa, Homo sapiens
  CDR3 for beta chain variable domain of TCR clone 393798 (TRBV18, TRBJ2-1)
CASSPGTGGSGEQFF

SEQ ID NO: 787597 - protein, 13 aa, Homo sapiens
  CDR3 for alpha chain variable domain of TCR clone 393799 (TRAV26-1, TRAJ48)
CIVRVVGDEKLTF

SEQ ID NO: 787598 - protein, 19 aa, Homo sapiens
  CDR3 for beta chain variable domain of TCR clone 393799 (TRBV11-3, TRBJ2-2)
CASSTRPGAKTTDTGELFF

SEQ ID NO: 787599 - protein, 15 aa, Homo sapiens
  CDR3 for alpha chain variable domain of TCR clone 393800 (TRAV21, TRAJ53)
CATLNSGGSNYKQTF

SEQ ID NO: 787600 - protein, 13 aa, Homo sapiens
  CDR3 for beta chain variable domain of TCR clone 393800 (TRBV7-2, TRBJ1-1)
CASNLKGAKVAFF

SEQ ID NO: 787601 - protein, 14 aa, Homo sapiens
  CDR3 for alpha chain variable domain of TCR clone 393801 (TRAV1-2, TRAJ8)
CAVREDTGFQKLFF

SEQ ID NO: 787602 - protein, 15 aa, Homo sapiens
  CDR3 for beta chain variable domain of TCR clone 393801 (TRBV6-3, TRBJ2-7)
CASSSPGTVFYEQYF

SEQ ID NO: 787603 - protein, 14 aa, Homo sapiens
  CDR3 for alpha chain variable domain of TCR clone 393802 (TRAV12-3, TRAJ21)
CAATDLYNFNKFYF

SEQ ID NO: 787604 - protein, 14 aa, Homo sapiens
  CDR3 for beta chain variable domain of TCR clone 393802 (TRBV7-3, TRBJ1-1)
CASSLKGGNTEAFF

SEQ ID NO: 787605 - protein, 14 aa, Homo sapiens
  CDR3 for alpha chain variable domain of TCR clone 393803 (TRAV38-1, TRAJ45)
CAYYSGGGADGLTF

SEQ ID NO: 787606 - protein, 19 aa, Homo sapiens
  CDR3 for beta chain variable domain of TCR clone 393803 (TRBV28, TRBJ2-1)
CQHPYWTVTGTSGGNEQFF

SEQ ID NO: 787607 - protein, 14 aa, Homo sapiens
  CDR3 for alpha chain variable domain of TCR clone 393804 (TRAV12-2, TRAJ17)
CAVLFKPAGNKLTF

SEQ ID NO: 787608 - protein, 15 aa, Homo sapiens
  CDR3 for beta chain variable domain of TCR clone 393804 (TRBV20-1, TRBJ2-7)
CSARDRVSGMDEQYF

SEQ ID NO: 787609 - protein, 12 aa, Homo sapiens
  CDR3 for alpha chain variable domain of TCR clone 393805 (TRAV20, TRAJ56)
CAVTGANSKLTF

SEQ ID NO: 787610 - protein, 15 aa, Homo sapiens
  CDR3 for beta chain variable domain of TCR clone 393805 (TRBV9, TRBJ1-6)
CASSVAGTGDSPLQF

SEQ ID NO: 787611 - protein, 13 aa, Homo sapiens
  CDR3 for alpha chain variable domain of TCR clone 393806 (TRAV13-2, TRAJ40)
CAEFTSGTYKYIF

SEQ ID NO: 787612 - protein, 11 aa, Homo sapiens
  CDR3 for beta chain variable domain of TCR clone 393806 (TRBV29-1, TRBJ2-5)
CSEDRTGTQYF

SEQ ID NO: 787613 - protein, 14 aa, Homo sapiens
  CDR3 for alpha chain variable domain of TCR clone 393807 (TRAV17, TRAJ35)
CATDRPGFGNVLHC

SEQ ID NO: 787614 - protein, 19 aa, Homo sapiens
  CDR3 for beta chain variable domain of TCR clone 393807 (TRBV11-3, TRBJ2-2)
CACSTRPGAKTTNTGELFF

SEQ ID NO: 787615 - protein, 16 aa, Homo sapiens
  CDR3 for alpha chain variable domain of TCR clone 393808 (TRAV12-2, TRAJ6)
CAAPLAGSGGSSIPTF

SEQ ID NO: 787616 - protein, 13 aa, Homo sapiens
  CDR3 for beta chain variable domain of TCR clone 393808 (TRBV6-9, TRBJ2-5)
CASKGDGRRTQYF

SEQ ID NO: 787617 - protein, 17 aa, Homo sapiens
  CDR3 for alpha chain variable domain of TCR clone 393809 (TRAV12-2, TRAJ36)
CAVKDNLFFGTGTRLTV

SEQ ID NO: 787618 - protein, 15 aa, Homo sapiens
  CDR3 for beta chain variable domain of TCR clone 393809 (TRBV28, TRBJ2-2)
CASTVAGANPGELFF

SEQ ID NO: 787619 - protein, 12 aa, Homo sapiens
  CDR3 for alpha chain variable domain of TCR clone 393810 (TRAV3, TRAJ20)
CAVRDPDYKLSF

SEQ ID NO: 787620 - protein, 15 aa, Homo sapiens
  CDR3 for beta chain variable domain of TCR clone 393810 (TRBV7-9, TRBJ2-5)
CASSDTGRGRETQYF

SEQ ID NO: 787621 - protein, 16 aa, Homo sapiens
  CDR3 for alpha chain variable domain of TCR clone 393811 (TRAV3, TRAJ37)
CALRPHGPGNTGKLIF

SEQ ID NO: 787622 - protein, 13 aa, Homo sapiens
  CDR3 for beta chain variable domain of TCR clone 393811 (TRBV2, TRBJ1-5)
CASGTGGYQPQHF

SEQ ID NO: 787623 - protein, 13 aa, Homo sapiens
  CDR3 for alpha chain variable domain of TCR clone 393812 (TRAV3, TRAJ29)
CAVRDIIDTPLVF

SEQ ID NO: 787624 - protein, 17 aa, Homo sapiens
  CDR3 for beta chain variable domain of TCR clone 393812 (TRBV27, TRBJ2-1)
CTSVPAVLRGGYNEQFF

SEQ ID NO: 787625 - protein, 12 aa, Homo sapiens
  CDR3 for alpha chain variable domain of TCR clone 393813 (TRAV16, TRAJ9)
CALSSGGFKTIF

SEQ ID NO: 787626 - protein, 15 aa, Homo sapiens
  CDR3 for beta chain variable domain of TCR clone 393813 (TRBV4-1, TRBJ2-7)
CASSQNTGRLYEQYF

SEQ ID NO: 787627 - protein, 16 aa, Homo sapiens
  CDR3 for alpha chain variable domain of TCR clone 393814 (TRAV12-3, TRAJ53)
CAMSPGRGGSNYKLTF

SEQ ID NO: 787628 - protein, 14 aa, Homo sapiens
  CDR3 for beta chain variable domain of TCR clone 393814 (TRBV19, TRBJ2-1)
CASPTFVLSGEQFF

SEQ ID NO: 787629 - protein, 12 aa, Homo sapiens
  CDR3 for alpha chain variable domain of TCR clone 393815 (TRAV16, TRAJ56)
FAPTGANSKLTF

SEQ ID NO: 787630 - protein, 17 aa, Homo sapiens
  CDR3 for beta chain variable domain of TCR clone 393815 (TRBV27, TRBJ2-6)
CAGSLTGFASGANVLTF

SEQ ID NO: 787631 - protein, 13 aa, Homo sapiens
  CDR3 for alpha chain variable domain of TCR clone 393816 (TRAV29/DV5, TRAJ54)
CAASIQGAQKLVF

SEQ ID NO: 787632 - protein, 15 aa, Homo sapiens
  CDR3 for beta chain variable domain of TCR clone 393816 (TRBV5-1, TRBJ2-7)
CASSLYPDGGYEQYF

SEQ ID NO: 787633 - protein, 13 aa, Homo sapiens
  CDR3 for alpha chain variable domain of TCR clone 393817 (TRAV20, TRAJ42)
CAVQGGSQGNLIF

SEQ ID NO: 787634 - protein, 12 aa, Homo sapiens
  CDR3 for beta chain variable domain of TCR clone 393817 (TRBV11-2, TRBJ2-1)
CASSPGNNEQFF

SEQ ID NO: 787635 - protein, 13 aa, Homo sapiens
  CDR3 for alpha chain variable domain of TCR clone 393818 (TRAV30, TRAJ20)
CGTEDRSDYKPSF

SEQ ID NO: 787636 - protein, 15 aa, Homo sapiens
  CDR3 for beta chain variable domain of TCR clone 393818 (TRBV2, TRBJ1-2)
CASTHVQDSNYGYTF

SEQ ID NO: 787637 - protein, 12 aa, Homo sapiens
  CDR3 for alpha chain variable domain of TCR clone 393819 (TRAV13-2, TRAJ23)
CAERHRGGKLIF

SEQ ID NO: 787638 - protein, 15 aa, Homo sapiens
  CDR3 for beta chain variable domain of TCR clone 393819 (TRBV9, TRBJ1-6)
CASSVAGTGDSALHF

SEQ ID NO: 787639 - protein, 13 aa, Homo sapiens
  CDR3 for alpha chain variable domain of TCR clone 393820 (TRAV1-2, TRAJ26)
CAVRPNYGQNFVF

SEQ ID NO: 787640 - protein, 14 aa, Homo sapiens
  CDR3 for beta chain variable domain of TCR clone 393820 (TRBV4-1, TRBJ2-5)
CARSQDLALETQYF

SEQ ID NO: 787641 - protein, 14 aa, Homo sapiens
  CDR3 for alpha chain variable domain of TCR clone 393821 (TRAV20, TRAJ56)
CAVQFGGANSKLTF

SEQ ID NO: 787642 - protein, 16 aa, Homo sapiens
  CDR3 for beta chain variable domain of TCR clone 393821 (TRBV7-3, TRBJ2-2)
CASSLKRGTLSGELFF

SEQ ID NO: 787643 - protein, 16 aa, Homo sapiens
  CDR3 for alpha chain variable domain of TCR clone 393822 (TRAV1-2, TRAJ10)
CAVRGVLTGGGNKLTF

SEQ ID NO: 787644 - protein, 13 aa, Homo sapiens
  CDR3 for beta chain variable domain of TCR clone 393822 (TRBV7-2, TRBJ2-2)
CASSSVRAGELFF

SEQ ID NO: 787645 - protein, 16 aa, Homo sapiens
  CDR3 for alpha chain variable domain of TCR clone 393823 (TRAV3, TRAJ37)
CAVRPHGSGNTGKLIF

SEQ ID NO: 787646 - protein, 16 aa, Homo sapiens
  CDR3 for beta chain variable domain of TCR clone 393823 (TRBV10-3, TRBJ2-1)
CAISGVGDGGGGEQFF

SEQ ID NO: 787647 - protein, 14 aa, Homo sapiens
  CDR3 for alpha chain variable domain of TCR clone 393824 (TRAV12-2, TRAJ45)
CAVNIGGGADGLTF

SEQ ID NO: 787648 - protein, 13 aa, Homo sapiens
  CDR3 for beta chain variable domain of TCR clone 393824 (TRBV9, TRBJ2-2)
CASSPRPAGELFF

SEQ ID NO: 787649 - protein, 15 aa, Homo sapiens
  CDR3 for alpha chain variable domain of TCR clone 393825 (TRAV21, TRAJ53)
CATLNSGGSNYKLTF

SEQ ID NO: 787650 - protein, 14 aa, Homo sapiens
  CDR3 for beta chain variable domain of TCR clone 393825 (TRBV15, TRBJ2-5)
CATSIGGLGEAQYF

SEQ ID NO: 787651 - protein, 15 aa, Homo sapiens
  CDR3 for alpha chain variable domain of TCR clone 393826 (TRAV2, TRAJ24)
CAVEVLTDSWGKFQF

SEQ ID NO: 787652 - protein, 18 aa, Homo sapiens
  CDR3 for beta chain variable domain of TCR clone 393826 (TRBV12-4, TRBJ2-2)
CASSLVAGTRGRTGELFF

SEQ ID NO: 787653 - protein, 13 aa, Homo sapiens
  CDR3 for alpha chain variable domain of TCR clone 393827 (TRAV3, TRAJ27)
CAVRPLGAGKSTF

SEQ ID NO: 787654 - protein, 15 aa, Homo sapiens
  CDR3 for beta chain variable domain of TCR clone 393827 (TRBV9, TRBJ1-6)
CASSVAGTGDSPLRF

SEQ ID NO: 787655 - protein, 13 aa, Homo sapiens
  CDR3 for alpha chain variable domain of TCR clone 393828 (TRAV12-3, TRAJ41)
CAMSVGSGYALNF

SEQ ID NO: 787656 - protein, 12 aa, Homo sapiens
  CDR3 for beta chain variable domain of TCR clone 393828 (TRBV11-2, TRBJ2-1)
CASSVQREGQFF

SEQ ID NO: 787657 - protein, 14 aa, Homo sapiens
  CDR3 for alpha chain variable domain of TCR clone 393829 (TRAV30, TRAJ33)
CGTVAPRSNYQLIW

SEQ ID NO: 787658 - protein, 14 aa, Homo sapiens
  CDR3 for beta chain variable domain of TCR clone 393829 (TRBV4-2, TRBJ2-7)
PAAKLAGGTYEQYF

SEQ ID NO: 787659 - protein, 13 aa, Homo sapiens
  CDR3 for alpha chain variable domain of TCR clone 393830 (TRAV13-1, TRAJ5)
CAARLTGRRALTF

SEQ ID NO: 787660 - protein, 15 aa, Homo sapiens
  CDR3 for beta chain variable domain of TCR clone 393830 (TRBV28, TRBJ2-7)
CASSPGGRGFYEQYF

SEQ ID NO: 787661 - protein, 14 aa, Homo sapiens
  CDR3 for alpha chain variable domain of TCR clone 393831 (TRAV12-3, TRAJ10)
SHLPLTGGGNKLTF

SEQ ID NO: 787662 - protein, 13 aa, Homo sapiens
  CDR3 for beta chain variable domain of TCR clone 393831 (TRBV20-1, TRBJ2-1)
CSARSSPRDEQFF

SEQ ID NO: 787663 - protein, 14 aa, Homo sapiens
  CDR3 for alpha chain variable domain of TCR clone 393832 (TRAV12-3, TRAJ10)
SHLPLTGGGNKLTF

SEQ ID NO: 787664 - protein, 15 aa, Homo sapiens
  CDR3 for beta chain variable domain of TCR clone 393832 (TRBV7-3, TRBJ2-2)
CASRETGQGTGELFF

SEQ ID NO: 787665 - protein, 13 aa, Homo sapiens
  CDR3 for alpha chain variable domain of TCR clone 393833 (TRAV8-4, TRAJ30)
CAVSVNRDDKVIF

SEQ ID NO: 787666 - protein, 12 aa, Homo sapiens
  CDR3 for beta chain variable domain of TCR clone 393833 (TRBV11-2, TRBJ2-2)
CASSLGGGELFF

SEQ ID NO: 787667 - protein, 17 aa, Homo sapiens
  CDR3 for alpha chain variable domain of TCR clone 393834 (TRAV8-6, TRAJ58)
CAVSSWVGETSGSRLTF

SEQ ID NO: 787668 - protein, 14 aa, Homo sapiens
  CDR3 for beta chain variable domain of TCR clone 393834 (TRBV20-1, TRBJ2-3)
CSARGGTSTDTQYF

SEQ ID NO: 787669 - protein, 13 aa, Homo sapiens
  CDR3 for alpha chain variable domain of TCR clone 393835 (TRAV2, TRAJ40)
CAVVTSGTYKYIF

SEQ ID NO: 787670 - protein, 14 aa, Homo sapiens
  CDR3 for beta chain variable domain of TCR clone 393835 (TRBV7-6, TRBJ2-1)
GASSLGGGADEQFF

SEQ ID NO: 787671 - protein, 17 aa, Homo sapiens
  CDR3 for alpha chain variable domain of TCR clone 393836 (TRAV26-1, TRAJ53)
CIVRVDVSGGSNYKLTF

SEQ ID NO: 787672 - protein, 15 aa, Homo sapiens
  CDR3 for beta chain variable domain of TCR clone 393836 (TRBV7-9, TRBJ1-4)
CASSRTGGFNEKLFF

SEQ ID NO: 787673 - protein, 15 aa, Homo sapiens
  CDR3 for alpha chain variable domain of TCR clone 393837 (TRAV12-1, TRAJ44)
CVVDEYTGTASKLTF

SEQ ID NO: 787674 - protein, 18 aa, Homo sapiens
  CDR3 for beta chain variable domain of TCR clone 393837 (TRBV11-2, TRBJ2-3)
CASSLGGASRGAPNTQYF

SEQ ID NO: 787675 - protein, 14 aa, Homo sapiens
  CDR3 for alpha chain variable domain of TCR clone 393838 (TRAV12-1, TRAJ17)
GVVNCKAAGNKLTF

SEQ ID NO: 787676 - protein, 17 aa, Homo sapiens
  CDR3 for beta chain variable domain of TCR clone 393838 (TRBV20-1, TRBJ2-1)
CSASSSGLAGSYNEQFF

SEQ ID NO: 787677 - protein, 15 aa, Homo sapiens
  CDR3 for alpha chain variable domain of TCR clone 393839 (TRAV12-2, TRAJ53)
CAVNGGGGINYKLTF

SEQ ID NO: 787678 - protein, 13 aa, Homo sapiens
  CDR3 for beta chain variable domain of TCR clone 393839 (TRBV3-1, TRBJ1-1)
CASSPGVITEAFF

SEQ ID NO: 787679 - protein, 10 aa, Homo sapiens
  CDR3 for alpha chain variable domain of TCR clone 393840 (TRAV21, TRAJ31)
CAVDNARLMF

SEQ ID NO: 787680 - protein, 13 aa, Homo sapiens
  CDR3 for beta chain variable domain of TCR clone 393840 (TRBV7-9, TRBJ1-2)
CASSLKQNYGYTF

SEQ ID NO: 787681 - protein, 15 aa, Homo sapiens
  CDR3 for alpha chain variable domain of TCR clone 393841 (TRAV17, TRAJ13)
CVTVPNSGGYQKVTF

SEQ ID NO: 787682 - protein, 13 aa, Homo sapiens
  CDR3 for beta chain variable domain of TCR clone 393841 (TRBV3-1, TRBJ1-5)
CASSQAGGQPQHF

SEQ ID NO: 787683 - protein, 13 aa, Homo sapiens
  CDR3 for alpha chain variable domain of TCR clone 393842 (TRAV27, TRAJ41)
CAGEGNSGYALNF

SEQ ID NO: 787684 - protein, 14 aa, Homo sapiens
  CDR3 for beta chain variable domain of TCR clone 393842 (TRBV7-2, TRBJ1-1)
CASSFLTGTTAAFF

SEQ ID NO: 787685 - protein, 16 aa, Homo sapiens
  CDR3 for alpha chain variable domain of TCR clone 393843 (TRAV12-3, TRAJ53)
CAMSPGSGGSNYNLTF

SEQ ID NO: 787686 - protein, 14 aa, Homo sapiens
  CDR3 for beta chain variable domain of TCR clone 393843 (TRBV4-2, TRBJ2-1)
CASGLDRAYNEQFC

SEQ ID NO: 787687 - protein, 14 aa, Homo sapiens
  CDR3 for alpha chain variable domain of TCR clone 393844 (TRAV13-1, TRAJ44)
CAAKATGTASKLTF

SEQ ID NO: 787688 - protein, 17 aa, Homo sapiens
  CDR3 for beta chain variable domain of TCR clone 393844 (TRBV7-3, TRBJ2-3)
YASSLMKRMRGADTQYF

SEQ ID NO: 787689 - protein, 14 aa, Homo sapiens
  CDR3 for alpha chain variable domain of TCR clone 393845 (TRAV13-1, TRAJ40)
CAASMTSGTYKYII

SEQ ID NO: 787690 - protein, 15 aa, Homo sapiens
  CDR3 for beta chain variable domain of TCR clone 393845 (TRBV7-3, TRBJ2-1)
CASSPTGGGEVEQFF

SEQ ID NO: 787691 - protein, 16 aa, Homo sapiens
  CDR3 for alpha chain variable domain of TCR clone 393846 (TRAV17, TRAJ22)
CATGPISSGSARQLSF

SEQ ID NO: 787692 - protein, 13 aa, Homo sapiens
  CDR3 for beta chain variable domain of TCR clone 393846 (TRBV11-2, TRBJ2-1)
CASSLGLAGGRFF

SEQ ID NO: 787693 - protein, 13 aa, Homo sapiens
  CDR3 for alpha chain variable domain of TCR clone 393847 (TRAV8-6, TRAJ40)
CAGSVTGTYKYIF

SEQ ID NO: 787694 - protein, 15 aa, Homo sapiens
  CDR3 for beta chain variable domain of TCR clone 393847 (TRBV4-1, TRBJ2-3)
CASSRGQGIPDTQYF

SEQ ID NO: 787695 - protein, 11 aa, Homo sapiens
  CDR3 for alpha chain variable domain of TCR clone 393848 (TRAV3, TRAJ21)
CAVGNFNRFYF

SEQ ID NO: 787696 - protein, 16 aa, Homo sapiens
  CDR3 for beta chain variable domain of TCR clone 393848 (TRBV19, TRBJ2-1)
CASSKTGPSSYNEQFF

SEQ ID NO: 787697 - protein, 15 aa, Homo sapiens
  CDR3 for alpha chain variable domain of TCR clone 393849 (TRAV1-2, TRAJ28)
CAVQYSGAGSYQLTF

SEQ ID NO: 787698 - protein, 13 aa, Homo sapiens
  CDR3 for beta chain variable domain of TCR clone 393849 (TRBV18, TRBJ2-3)
CASSPGVTDTQYF

SEQ ID NO: 787699 - protein, 12 aa, Homo sapiens
  CDR3 for alpha chain variable domain of TCR clone 393850 (TRAV12-3, TRAJ17)
CAMTLTDNKLTF

SEQ ID NO: 787700 - protein, 13 aa, Homo sapiens
  CDR3 for beta chain variable domain of TCR clone 393850 (TRBV6-5, TRBJ1-1)
QTSVYFCALRAFF

SEQ ID NO: 787701 - protein, 14 aa, Homo sapiens
  CDR3 for alpha chain variable domain of TCR clone 393851 (TRAV30, TRAJ33)
CGTVAPRSNYQLIW

SEQ ID NO: 787702 - protein, 14 aa, Homo sapiens
  CDR3 for beta chain variable domain of TCR clone 393851 (TRBV25-1, TRBJ1-1)
CASTHLGGNTEAFF

SEQ ID NO: 787703 - protein, 15 aa, Homo sapiens
  CDR3 for alpha chain variable domain of TCR clone 393852 (TRAV3, TRAJ3)
CCERPRYSSASKIVF

SEQ ID NO: 787704 - protein, 13 aa, Homo sapiens
  CDR3 for beta chain variable domain of TCR clone 393852 (TRBV20-1, TRBJ2-2)
CSASAAGTGELFF

SEQ ID NO: 787705 - protein, 14 aa, Homo sapiens
  CDR3 for alpha chain variable domain of TCR clone 393853 (TRAV1-2, TRAJ8)
CAVREDIGFKKLVF

SEQ ID NO: 787706 - protein, 14 aa, Homo sapiens
  CDR3 for beta chain variable domain of TCR clone 393853 (TRBV29-1, TRBJ1-4)
CSVTGTGGNEKLFF

SEQ ID NO: 787707 - protein, 17 aa, Homo sapiens
  CDR3 for alpha chain variable domain of TCR clone 393854 (TRAV26-1, TRAJ57)
CIVRPRFTQGGSEKLVF

SEQ ID NO: 787708 - protein, 16 aa, Homo sapiens
  CDR3 for beta chain variable domain of TCR clone 393854 (TRBV13, TRBJ2-2)
CASSEVCGANTGELFF

SEQ ID NO: 787709 - protein, 14 aa, Homo sapiens
  CDR3 for alpha chain variable domain of TCR clone 393855 (TRAV12-3, TRAJ15)
CAMIPPQAATALIF

SEQ ID NO: 787710 - protein, 12 aa, Homo sapiens
  CDR3 for beta chain variable domain of TCR clone 393855 (TRBV11-2, TRBJ2-2)
CASRFGGGELFF

SEQ ID NO: 787711 - protein, 14 aa, Homo sapiens
  CDR3 for alpha chain variable domain of TCR clone 393856 (TRAV26-1, TRAJ57)
CIRAGQGGSEKLFF

SEQ ID NO: 787712 - protein, 13 aa, Homo sapiens
  CDR3 for beta chain variable domain of TCR clone 393856 (TRBV19, TRBJ2-7)
CASSLTTSYEQYF

SEQ ID NO: 787713 - protein, 10 aa, Homo sapiens
  CDR3 for alpha chain variable domain of TCR clone 393857 (TRAV8-4, TRAJ43)
CAVSADDMRC

SEQ ID NO: 787714 - protein, 15 aa, Homo sapiens
  CDR3 for beta chain variable domain of TCR clone 393857 (TRBV5-1, TRBJ2-3)
CASSVTSGSTDTQYF

SEQ ID NO: 787715 - protein, 13 aa, Homo sapiens
  CDR3 for alpha chain variable domain of TCR clone 393858 (TRAV8-3, TRAJ48)
CAVVPFGNEKLTF

SEQ ID NO: 787716 - protein, 19 aa, Homo sapiens
  CDR3 for beta chain variable domain of TCR clone 393858 (TRBV25-1, TRBJ2-2)
CAILVYRVDRGRKTGELFV

SEQ ID NO: 787717 - protein, 17 aa, Homo sapiens
  CDR3 for alpha chain variable domain of TCR clone 393859 (TRAV4, TRAJ42)
CLLGVLNYGGGQGNLIF

SEQ ID NO: 787718 - protein, 12 aa, Homo sapiens
  CDR3 for beta chain variable domain of TCR clone 393859 (TRBV20-1, TRBJ2-1)
CSAQYTYNEQFF

SEQ ID NO: 787719 - protein, 19 aa, Homo sapiens
  CDR3 for alpha chain variable domain of TCR clone 393860 (TRAV2, TRAJ20)
ILQVREADAAVYRDCKLSF

SEQ ID NO: 787720 - protein, 13 aa, Homo sapiens
  CDR3 for beta chain variable domain of TCR clone 393860 (TRBV27, TRBJ1-1)
CASSLSIGAEAFF

SEQ ID NO: 787721 - protein, 13 aa, Homo sapiens
  CDR3 for alpha chain variable domain of TCR clone 393861 (TRAV17, TRAJ26)
CATVDNYGQNFVF

SEQ ID NO: 787722 - protein, 13 aa, Homo sapiens
  CDR3 for beta chain variable domain of TCR clone 393861 (TRBV28, TRBJ2-7)
CASSLPSRYEQYF

SEQ ID NO: 787723 - protein, 13 aa, Homo sapiens
  CDR3 for alpha chain variable domain of TCR clone 393862 (TRAV23/DV6, TRAJ43)
CAASMGGNNDMRF

SEQ ID NO: 787724 - protein, 14 aa, Homo sapiens
  CDR3 for beta chain variable domain of TCR clone 393862 (TRBV3-1, TRBJ2-3)
CASSWSGVGDTHYF

SEQ ID NO: 787725 - protein, 14 aa, Homo sapiens
  CDR3 for alpha chain variable domain of TCR clone 393863 (TRAV17, TRAJ57)
CATDPQSGSEKLVF

SEQ ID NO: 787726 - protein, 14 aa, Homo sapiens
  CDR3 for beta chain variable domain of TCR clone 393863 (TRBV25-1, TRBJ1-1)
CASTHLGGNTEAFF

SEQ ID NO: 787727 - protein, 15 aa, Homo sapiens
  CDR3 for alpha chain variable domain of TCR clone 393864 (TRAV2, TRAJ24)
CAVEVLTASWGKFRF

SEQ ID NO: 787728 - protein, 14 aa, Homo sapiens
  CDR3 for beta chain variable domain of TCR clone 393864 (TRBV19, TRBJ2-1)
CASSMGSGRRSSSS

SEQ ID NO: 787729 - protein, 15 aa, Homo sapiens
  CDR3 for alpha chain variable domain of TCR clone 393865 (TRAV13-1, TRAJ42)
CTASIAGGSQGNLIF

SEQ ID NO: 787730 - protein, 15 aa, Homo sapiens
  CDR3 for beta chain variable domain of TCR clone 393865 (TRBV19, TRBJ2-1)
CASSIVRGEGREQFF

SEQ ID NO: 787731 - protein, 17 aa, Homo sapiens
  CDR3 for alpha chain variable domain of TCR clone 393866 (TRAV23/DV6, )
CAADIQNPDPAVYQLRD

SEQ ID NO: 787732 - protein, 14 aa, Homo sapiens
  CDR3 for beta chain variable domain of TCR clone 393866 (TRBV5-7, TRBJ1-6)
CASSFAAHNSPLHF

SEQ ID NO: 787733 - protein, 11 aa, Homo sapiens
  CDR3 for alpha chain variable domain of TCR clone 393867 (TRAV13-1, TRAJ20)
CSPHGLYKLSF

SEQ ID NO: 787734 - protein, 14 aa, Homo sapiens
  CDR3 for beta chain variable domain of TCR clone 393867 (TRBV28, TRBJ2-5)
CASTGAGGVENQYF

SEQ ID NO: 787735 - protein, 16 aa, Homo sapiens
  CDR3 for alpha chain variable domain of TCR clone 393868 (TRAV1-2, TRAJ10)
CAVRGVLTEGGNKPTF

SEQ ID NO: 787736 - protein, 13 aa, Homo sapiens
  CDR3 for beta chain variable domain of TCR clone 393868 (TRBV10-3, TRBJ2-7)
CASKLAVNYEQYF

SEQ ID NO: 787737 - protein, 12 aa, Homo sapiens
  CDR3 for alpha chain variable domain of TCR clone 393869 (TRAV13-1, TRAJ42)
SVLQGSQGNLIF

SEQ ID NO: 787738 - protein, 13 aa, Homo sapiens
  CDR3 for beta chain variable domain of TCR clone 393869 (TRBV2, TRBJ1-4)
CASSELGVEKLFF

SEQ ID NO: 787739 - protein, 14 aa, Homo sapiens
  CDR3 for alpha chain variable domain of TCR clone 393870 (TRAV16, TRAJ42)
CALCGMGSQGNLIF

SEQ ID NO: 787740 - protein, 14 aa, Homo sapiens
  CDR3 for beta chain variable domain of TCR clone 393870 (TRBV6-1, TRBJ1-3)
CASVQGGGGNTIYF

SEQ ID NO: 787741 - protein, 13 aa, Homo sapiens
  CDR3 for alpha chain variable domain of TCR clone 393871 (TRAV26-1, TRAJ9)
CIATYTGGFKTIF

SEQ ID NO: 787742 - protein, 15 aa, Homo sapiens
  CDR3 for beta chain variable domain of TCR clone 393871 (TRBV7-8, TRBJ2-1)
CASSLAGGLYNEQFF

SEQ ID NO: 787743 - protein, 16 aa, Homo sapiens
  CDR3 for alpha chain variable domain of TCR clone 393872 (TRAV1-2, TRAJ10)
CAVRGVLTGGGNKLTF

SEQ ID NO: 787744 - protein, 16 aa, Homo sapiens
  CDR3 for beta chain variable domain of TCR clone 393872 (TRBV4-1, TRBJ2-7)
CASSQEWTSGPLEQYF

SEQ ID NO: 787745 - protein, 15 aa, Homo sapiens
  CDR3 for alpha chain variable domain of TCR clone 393873 (TRAV17, TRAJ57)
CATGPSQGGSEKLVF

SEQ ID NO: 787746 - protein, 13 aa, Homo sapiens
  CDR3 for beta chain variable domain of TCR clone 393873 (TRBV27, TRBJ1-4)
CASSLMGDEKLLF

SEQ ID NO: 787747 - protein, 15 aa, Homo sapiens
  CDR3 for alpha chain variable domain of TCR clone 393874 (TRAV8-3, TRAJ45)
CASSYSGGGADGLPF

SEQ ID NO: 787748 - protein, 13 aa, Homo sapiens
  CDR3 for beta chain variable domain of TCR clone 393874 (TRBV10-3, TRBJ2-7)
CASKLAVNYEQHF

SEQ ID NO: 787749 - protein, 15 aa, Homo sapiens
  CDR3 for alpha chain variable domain of TCR clone 393875 (TRAV36/DV7, TRAJ54)
CAVEKPVQGAQKLVF

SEQ ID NO: 787750 - protein, 17 aa, Homo sapiens
  CDR3 for beta chain variable domain of TCR clone 393875 (TRBV6-5, TRBJ1-2)
CASSSPWEGAFAYGYTF

SEQ ID NO: 787751 - protein, 14 aa, Homo sapiens
  CDR3 for alpha chain variable domain of TCR clone 393876 (TRAV12-2, TRAJ3)
CAVSLYSSASKIIF

SEQ ID NO: 787752 - protein, 10 aa, Homo sapiens
  CDR3 for beta chain variable domain of TCR clone 393876 (TRBV27, TRBJ2-1)
IAETYNEQFF

SEQ ID NO: 787753 - protein, 13 aa, Homo sapiens
  CDR3 for alpha chain variable domain of TCR clone 393877 (TRAV2, TRAJ29)
CAVRNSGNTPLVF

SEQ ID NO: 787754 - protein, 20 aa, Homo sapiens
  CDR3 for beta chain variable domain of TCR clone 393877 (TRBV7-8, TRBJ2-2)
CASSHLFPGPTIHITGELFF

SEQ ID NO: 787755 - protein, 17 aa, Homo sapiens
  CDR3 for alpha chain variable domain of TCR clone 393878 (TRAV4, TRAJ18)
CLVGERCVGSTLGRLYF

SEQ ID NO: 787756 - protein, 14 aa, Homo sapiens
  CDR3 for beta chain variable domain of TCR clone 393878 (TRBV6-5, TRBJ1-2)
CASSYDGTGGGYTF

SEQ ID NO: 787757 - protein, 17 aa, Homo sapiens
  CDR3 for alpha chain variable domain of TCR clone 393879 (TRAV3, TRAJ42)
CAVSDRDYGGSQGNLIF

SEQ ID NO: 787758 - protein, 18 aa, Homo sapiens
  CDR3 for beta chain variable domain of TCR clone 393879 (TRBV20-1, TRBJ2-3)
CSASGLAGGPGTTDTQYF

SEQ ID NO: 787759 - protein, 15 aa, Homo sapiens
  CDR3 for alpha chain variable domain of TCR clone 393880 (TRAV2, TRAJ28)
CAVPYSGAGSYQLTF

SEQ ID NO: 787760 - protein, 14 aa, Homo sapiens
  CDR3 for beta chain variable domain of TCR clone 393880 (TRBV19, TRBJ2-1)
CASPTFVLSGEQFF

SEQ ID NO: 787761 - protein, 18 aa, Homo sapiens
  CDR3 for alpha chain variable domain of TCR clone 393881 (TRAV13-2, TRAJ20)
CSYSTWRLSCLLVHKLSF

SEQ ID NO: 787762 - protein, 13 aa, Homo sapiens
  CDR3 for beta chain variable domain of TCR clone 393881 (TRBV2, TRBJ1-4)
CASSERAGEKLVF

SEQ ID NO: 787763 - protein, 18 aa, Homo sapiens
  CDR3 for alpha chain variable domain of TCR clone 393882 (TRAV26-1, TRAJ23)
CIVRVGLEVWNQGGKLIF

SEQ ID NO: 787764 - protein, 17 aa, Homo sapiens
  CDR3 for beta chain variable domain of TCR clone 393882 (TRBV7-3, TRBJ2-3)
CASSLMKRKRGADTQYF

SEQ ID NO: 787765 - protein, 16 aa, Homo sapiens
  CDR3 for alpha chain variable domain of TCR clone 393883 (TRAV14/DV4, TRAJ53)
CAMREGGGGSNYKLTF

SEQ ID NO: 787766 - protein, 17 aa, Homo sapiens
  CDR3 for beta chain variable domain of TCR clone 393883 (TRBV4-2, TRBJ2-2)
CASSQEPGGINTGELFF

SEQ ID NO: 787767 - protein, 13 aa, Homo sapiens
  CDR3 for alpha chain variable domain of TCR clone 393884 (TRAV3, TRAJ31)
CAVREGNNARLMF

SEQ ID NO: 787768 - protein, 16 aa, Homo sapiens
  CDR3 for beta chain variable domain of TCR clone 393884 (TRBV20-1, TRBJ1-2)
CSASMGQGVANYGYTF

SEQ ID NO: 787769 - protein, 13 aa, Homo sapiens
  CDR3 for alpha chain variable domain of TCR clone 393885 (TRAV2, TRAJ20)
CAVEDPSEDKLSF

SEQ ID NO: 787770 - protein, 16 aa, Homo sapiens
  CDR3 for beta chain variable domain of TCR clone 393885 (TRBV25-1, TRBJ2-7)
CASSELTGGGIYEQYF

SEQ ID NO: 787771 - protein, 12 aa, Homo sapiens
  CDR3 for alpha chain variable domain of TCR clone 393886 (TRAV13-2, TRAJ8)
CAPWLGFQKLAF

SEQ ID NO: 787772 - protein, 15 aa, Homo sapiens
  CDR3 for beta chain variable domain of TCR clone 393886 (TRBV12-4, TRBJ2-5)
CASSLSGAFQETQYF

SEQ ID NO: 787773 - protein, 11 aa, Homo sapiens
  CDR3 for alpha chain variable domain of TCR clone 393887 (TRAV21, TRAJ17)
CAAPAGNKLTF

SEQ ID NO: 787774 - protein, 17 aa, Homo sapiens
  CDR3 for beta chain variable domain of TCR clone 393887 (TRBV11-2, TRBJ2-1)
CASSLYPPGVEYNEQFF

SEQ ID NO: 787775 - protein, 14 aa, Homo sapiens
  CDR3 for alpha chain variable domain of TCR clone 393888 (TRAV12-2, TRAJ13)
CAVKKTGGYQKLTF

SEQ ID NO: 787776 - protein, 12 aa, Homo sapiens
  CDR3 for beta chain variable domain of TCR clone 393888 (TRBV11-2, TRBJ2-2)
CASSLGGGELFF

SEQ ID NO: 787777 - protein, 12 aa, Homo sapiens
  CDR3 for alpha chain variable domain of TCR clone 393889 (TRAV12-2, TRAJ20)
CAVRPSDYKLSF

SEQ ID NO: 787778 - protein, 14 aa, Homo sapiens
  CDR3 for beta chain variable domain of TCR clone 393889 (TRBV2, TRBJ1-5)
CASSENRGGQPQHF

SEQ ID NO: 787779 - protein, 14 aa, Homo sapiens
  CDR3 for alpha chain variable domain of TCR clone 393890 (TRAV17, TRAJ4)
CATAPLGGYNKLIF

SEQ ID NO: 787780 - protein, 13 aa, Homo sapiens
  CDR3 for beta chain variable domain of TCR clone 393890 (TRBV12-4, TRBJ1-3)
CASSLASGNNIYF

SEQ ID NO: 787781 - protein, 12 aa, Homo sapiens
  CDR3 for alpha chain variable domain of TCR clone 393891 (TRAV13-1, TRAJ21)
CAAKEGYNKFYF

SEQ ID NO: 787782 - protein, 17 aa, Homo sapiens
  CDR3 for beta chain variable domain of TCR clone 393891 (TRBV4-1, TRBJ2-7)
CASSRDPLGVRGGEQYF

SEQ ID NO: 787783 - protein, 12 aa, Homo sapiens
  CDR3 for alpha chain variable domain of TCR clone 393892 (TRAV30, TRAJ43)
CGTEERGNDMRF

SEQ ID NO: 787784 - protein, 13 aa, Homo sapiens
  CDR3 for beta chain variable domain of TCR clone 393892 (TRBV27, TRBJ2-7)
CTSSFSQGYEQYF

SEQ ID NO: 787785 - protein, 12 aa, Homo sapiens
  CDR3 for alpha chain variable domain of TCR clone 393893 (TRAV12-2, TRAJ42)
CAVGGSQGNLIF

SEQ ID NO: 787786 - protein, 12 aa, Homo sapiens
  CDR3 for beta chain variable domain of TCR clone 393893 (TRBV28, TRBJ2-3)
CASSLYRDTQYF

SEQ ID NO: 787787 - protein, 14 aa, Homo sapiens
  CDR3 for alpha chain variable domain of TCR clone 393894 (TRAV1-2, TRAJ8)
CAVREDTGFQKLVF

SEQ ID NO: 787788 - protein, 15 aa, Homo sapiens
  CDR3 for beta chain variable domain of TCR clone 393894 (TRBV15, TRBJ1-1)
YATSLQGGRNTEAFF

SEQ ID NO: 787789 - protein, 14 aa, Homo sapiens
  CDR3 for alpha chain variable domain of TCR clone 393895 (TRAV1-2, TRAJ8)
CAVREDTGFQKLVF

SEQ ID NO: 787790 - protein, 15 aa, Homo sapiens
  CDR3 for beta chain variable domain of TCR clone 393895 (TRBV11-2, TRBJ2-1)
CASSKNRGLIYEQFF

SEQ ID NO: 787791 - protein, 20 aa, Homo sapiens
  CDR3 for alpha chain variable domain of TCR clone 393896 (TRAV4, TRAJ29)
CCVLLPRVCVPFSGNTPLVF

SEQ ID NO: 787792 - protein, 12 aa, Homo sapiens
  CDR3 for beta chain variable domain of TCR clone 393896 (TRBV6-1, TRBJ2-7)
CASSDYSYEQYF

SEQ ID NO: 787793 - protein, 14 aa, Homo sapiens
  CDR3 for alpha chain variable domain of TCR clone 393897 (TRAV13-1, TRAJ12)
CAASYMDSSYKLFF

SEQ ID NO: 787794 - protein, 13 aa, Homo sapiens
  CDR3 for beta chain variable domain of TCR clone 393897 (TRBV2, TRBJ2-5)
CASSDGIQETQYF

SEQ ID NO: 787795 - protein, 14 aa, Homo sapiens
  CDR3 for alpha chain variable domain of TCR clone 393898 (TRAV12-1, TRAJ12)
CVVNPMDSSYKLNF

SEQ ID NO: 787796 - protein, 16 aa, Homo sapiens
  CDR3 for beta chain variable domain of TCR clone 393898 (TRBV28, TRBJ2-2)
CTSVPAFGRAPGSCFF

SEQ ID NO: 787797 - protein, 12 aa, Homo sapiens
  CDR3 for alpha chain variable domain of TCR clone 393899 (TRAV20, TRAJ39)
CAVGNAGNMLTF

SEQ ID NO: 787798 - protein, 16 aa, Homo sapiens
  CDR3 for beta chain variable domain of TCR clone 393899 (TRBV15, TRBJ1-2)
YATSRGPRTGGGGYTF

SEQ ID NO: 787799 - protein, 17 aa, Homo sapiens
  CDR3 for alpha chain variable domain of TCR clone 393900 (TRAV3, TRAJ6)
CAERRPQGRRKLHTYIL

SEQ ID NO: 787800 - protein, 14 aa, Homo sapiens
  CDR3 for beta chain variable domain of TCR clone 393900 (TRBV25-1, TRBJ1-2)
CASSDTTGVVGYTF

SEQ ID NO: 787801 - protein, 15 aa, Homo sapiens
  CDR3 for alpha chain variable domain of TCR clone 393901 (TRAV3, TRAJ22)
CAVRDRGGSARQLTF

SEQ ID NO: 787802 - protein, 14 aa, Homo sapiens
  CDR3 for beta chain variable domain of TCR clone 393901 (TRBV12-4, TRBJ2-5)
CASSLWQKQETQYF

SEQ ID NO: 787803 - protein, 12 aa, Homo sapiens
  CDR3 for alpha chain variable domain of TCR clone 393902 (TRAV27, TRAJ35)
CAGADFGNVLHC

SEQ ID NO: 787804 - protein, 13 aa, Homo sapiens
  CDR3 for beta chain variable domain of TCR clone 393902 (TRBV7-3, TRBJ1-2)
CASSLKRGYVYTF

SEQ ID NO: 787805 - protein, 11 aa, Homo sapiens
  CDR3 for alpha chain variable domain of TCR clone 393903 (TRAV17, TRAJ31)
CATSNNARLMF

SEQ ID NO: 787806 - protein, 16 aa, Homo sapiens
  CDR3 for beta chain variable domain of TCR clone 393903 (TRBV7-8, TRBJ2-4)
YASSAERTLAKNIQYF

SEQ ID NO: 787807 - protein, 13 aa, Homo sapiens
  CDR3 for alpha chain variable domain of TCR clone 393904 (TRAV36/DV7, TRAJ49)
CAMEANTGNQFYF

SEQ ID NO: 787808 - protein, 13 aa, Homo sapiens
  CDR3 for beta chain variable domain of TCR clone 393904 (TRBV10-3, TRBJ2-7)
CASKLAVNYEQYF

SEQ ID NO: 787809 - protein, 12 aa, Homo sapiens
  CDR3 for alpha chain variable domain of TCR clone 393905 (TRAV27, TRAJ34)
CAGAKNTDKLIF

SEQ ID NO: 787810 - protein, 16 aa, Homo sapiens
  CDR3 for beta chain variable domain of TCR clone 393905 (TRBV4-2, TRBJ1-1)
CASSQAGFGMNTEAFF

SEQ ID NO: 787811 - protein, 17 aa, Homo sapiens
  CDR3 for alpha chain variable domain of TCR clone 393906 (TRAV19, TRAJ32)
CALSERPYGCATNKLIF

SEQ ID NO: 787812 - protein, 15 aa, Homo sapiens
  CDR3 for beta chain variable domain of TCR clone 393906 (TRBV28, TRBJ1-3)
CASSMGWASGNTIYF

SEQ ID NO: 787813 - protein, 13 aa, Homo sapiens
  CDR3 for alpha chain variable domain of TCR clone 393907 (TRAV8-6, TRAJ49)
CAVITNTGNKCYF

SEQ ID NO: 787814 - protein, 12 aa, Homo sapiens
  CDR3 for beta chain variable domain of TCR clone 393907 (TRBV12-4, TRBJ2-7)
CASSLGGYEQYF

SEQ ID NO: 787815 - protein, 18 aa, Homo sapiens
  CDR3 for alpha chain variable domain of TCR clone 393908 (TRAV12-3, TRAJ52)
CAMSVGGAGGTSYGKLTF

SEQ ID NO: 787816 - protein, 15 aa, Homo sapiens
  CDR3 for beta chain variable domain of TCR clone 393908 (TRBV20-1, TRBJ2-7)
CSARVPAAYFYEQYL

SEQ ID NO: 787817 - protein, 13 aa, Homo sapiens
  CDR3 for alpha chain variable domain of TCR clone 393909 (TRAV12-3, TRAJ54)
CSMTLQGAQKLVF

SEQ ID NO: 787818 - protein, 14 aa, Homo sapiens
  CDR3 for beta chain variable domain of TCR clone 393909 (TRBV4-1, TRBJ2-2)
CASSQAVNTGELFF

SEQ ID NO: 787819 - protein, 15 aa, Homo sapiens
  CDR3 for alpha chain variable domain of TCR clone 393910 (TRAV12-2, TRAJ57)
CAVSRGQGGSEMLVF

SEQ ID NO: 787820 - protein, 14 aa, Homo sapiens
  CDR3 for beta chain variable domain of TCR clone 393910 (TRBV20-1, TRBJ2-1)
CSAHPGLPYNEQFF

SEQ ID NO: 787821 - protein, 17 aa, Homo sapiens
  CDR3 for alpha chain variable domain of TCR clone 393911 (TRAV12-1, TRAJ42)
CVVMRMNYGGSQGNLIF

SEQ ID NO: 787822 - protein, 14 aa, Homo sapiens
  CDR3 for beta chain variable domain of TCR clone 393911 (TRBV25-1, TRBJ1-1)
CASTHLGGNTEAFF

SEQ ID NO: 787823 - protein, 17 aa, Homo sapiens
  CDR3 for alpha chain variable domain of TCR clone 393912 (TRAV17, TRAJ28)
CATDPRRAGAGSYQLTF

SEQ ID NO: 787824 - protein, 16 aa, Homo sapiens
  CDR3 for beta chain variable domain of TCR clone 393912 (TRBV25-1, TRBJ1-1)
CASSGDRDRGRIEAFF

SEQ ID NO: 787825 - protein, 15 aa, Homo sapiens
  CDR3 for alpha chain variable domain of TCR clone 393913 (TRAV20, TRAJ43)
CSVQAGKSSNNDMRF

SEQ ID NO: 787826 - protein, 14 aa, Homo sapiens
  CDR3 for beta chain variable domain of TCR clone 393913 (TRBV27, TRBJ2-1)
CASRHLGGGKEQFF

SEQ ID NO: 787827 - protein, 13 aa, Homo sapiens
  CDR3 for alpha chain variable domain of TCR clone 393914 (TRAV3, TRAJ21)
CAVREQDFNKFYF

SEQ ID NO: 787828 - protein, 14 aa, Homo sapiens
  CDR3 for beta chain variable domain of TCR clone 393914 (TRBV5-5, TRBJ1-2)
CASSLDPYNYGYTF

SEQ ID NO: 787829 - protein, 14 aa, Homo sapiens
  CDR3 for alpha chain variable domain of TCR clone 393915 (TRAV3, TRAJ28)
CAVRRGAGSYQLTS

SEQ ID NO: 787830 - protein, 16 aa, Homo sapiens
  CDR3 for beta chain variable domain of TCR clone 393915 (TRBV4-1, TRBJ2-7)
CASSQEWTSGPLEQYF

SEQ ID NO: 787831 - protein, 13 aa, Homo sapiens
  CDR3 for alpha chain variable domain of TCR clone 393916 (TRAV8-3, TRAJ48)
CAVVPFGNEKLTF

SEQ ID NO: 787832 - protein, 15 aa, Homo sapiens
  CDR3 for beta chain variable domain of TCR clone 393916 (TRBV11-2, TRBJ2-1)
CASSSPSTRYNVQFF

SEQ ID NO: 787833 - protein, 13 aa, Homo sapiens
  CDR3 for alpha chain variable domain of TCR clone 393917 (TRAV20, TRAJ54)
CALTFEGAQKLVY

SEQ ID NO: 787834 - protein, 13 aa, Homo sapiens
  CDR3 for beta chain variable domain of TCR clone 393917 (TRBV25-1, TRBJ1-1)
CQHPPGGNTEAFF

SEQ ID NO: 787835 - protein, 13 aa, Homo sapiens
  CDR3 for alpha chain variable domain of TCR clone 393918 (TRAV30, TRAJ24)
CGTVTDSWGKLQF

SEQ ID NO: 787836 - protein, 15 aa, Homo sapiens
  CDR3 for beta chain variable domain of TCR clone 393918 (TRBV7-9, TRBJ1-6)
CASSSPGRGNSPLHF

SEQ ID NO: 787837 - protein, 14 aa, Homo sapiens
  CDR3 for alpha chain variable domain of TCR clone 393919 (TRAV12-3, TRAJ10)
SHLPLTGGGNKLTF

SEQ ID NO: 787838 - protein, 17 aa, Homo sapiens
  CDR3 for beta chain variable domain of TCR clone 393919 (TRBV20-1, TRBJ2-2)
CSASGSGQCGLTGELFF

SEQ ID NO: 787839 - protein, 17 aa, Homo sapiens
  CDR3 for alpha chain variable domain of TCR clone 393920 (TRAV3, TRAJ6)
RAVRDGPRAGGSYIPTF

SEQ ID NO: 787840 - protein, 20 aa, Homo sapiens
  CDR3 for beta chain variable domain of TCR clone 393920 (TRBV28, TRBJ2-1)
CDSTPIGRSPGLAGGNEQFF

SEQ ID NO: 787841 - protein, 14 aa, Homo sapiens
  CDR3 for alpha chain variable domain of TCR clone 393921 (TRAV16, TRAJ37)
CALDISGNPGKLIF

SEQ ID NO: 787842 - protein, 14 aa, Homo sapiens
  CDR3 for beta chain variable domain of TCR clone 393921 (TRBV7-6, TRBJ2-7)
CASSFRQGADEQYF

SEQ ID NO: 787843 - protein, 14 aa, Homo sapiens
  CDR3 for alpha chain variable domain of TCR clone 393922 (TRAV1-1, TRAJ27)
CAVIYNTNAGKSTF

SEQ ID NO: 787844 - protein, 15 aa, Homo sapiens
  CDR3 for beta chain variable domain of TCR clone 393922 (TRBV7-2, TRBJ2-1)
CASSSGLKGGNEQFF

SEQ ID NO: 787845 - protein, 15 aa, Homo sapiens
  CDR3 for alpha chain variable domain of TCR clone 393923 (TRAV2, TRAJ13)
CATPSYSGGYQKVTF

SEQ ID NO: 787846 - protein, 17 aa, Homo sapiens
  CDR3 for beta chain variable domain of TCR clone 393923 (TRBV15, TRBJ1-4)
CATSRYGAGDPNEKLFF

SEQ ID NO: 787847 - protein, 15 aa, Homo sapiens
  CDR3 for alpha chain variable domain of TCR clone 393924 (TRAV12-3, TRAJ6)
CAMSASTGGSYIPTF

SEQ ID NO: 787848 - protein, 12 aa, Homo sapiens
  CDR3 for beta chain variable domain of TCR clone 393924 (TRBV11-2, TRBJ2-1)
CASSPGNNEQFF

SEQ ID NO: 787849 - protein, 16 aa, Homo sapiens
  CDR3 for alpha chain variable domain of TCR clone 393925 (TRAV12-2, TRAJ40)
CAVIRGCTSGTYKYIF

SEQ ID NO: 787850 - protein, 13 aa, Homo sapiens
  CDR3 for beta chain variable domain of TCR clone 393925 (TRBV7-9, TRBJ1-2)
CASSLKQNYGYTF

SEQ ID NO: 787851 - protein, 12 aa, Homo sapiens
  CDR3 for alpha chain variable domain of TCR clone 393926 (TRAV13-1, TRAJ48)
CAANFGNEKLTF

SEQ ID NO: 787852 - protein, 15 aa, Homo sapiens
  CDR3 for beta chain variable domain of TCR clone 393926 (TRBV7-9, TRBJ1-4)
CASSARTGGNEKLFF

SEQ ID NO: 787853 - protein, 14 aa, Homo sapiens
  CDR3 for alpha chain variable domain of TCR clone 393927 (TRAV8-2, TRAJ11)
GVVSEKSGYSTLTF

SEQ ID NO: 787854 - protein, 16 aa, Homo sapiens
  CDR3 for beta chain variable domain of TCR clone 393927 (TRBV28, TRBJ2-1)
CASSSPEDPRDNEQFF

SEQ ID NO: 787855 - protein, 10 aa, Homo sapiens
  CDR3 for alpha chain variable domain of TCR clone 393928 (TRAV21, TRAJ35)
CAVFGNVLHC

SEQ ID NO: 787856 - protein, 15 aa, Homo sapiens
  CDR3 for beta chain variable domain of TCR clone 393928 (TRBV11-3, TRBJ2-3)
CASLKDGREGDTQYF

SEQ ID NO: 787857 - protein, 14 aa, Homo sapiens
  CDR3 for alpha chain variable domain of TCR clone 393929 (TRAV8-1, TRAJ5)
CDVRTDTGRRALTF

SEQ ID NO: 787858 - protein, 16 aa, Homo sapiens
  CDR3 for beta chain variable domain of TCR clone 393929 (TRBV29-1, TRBJ2-7)
CSVEVVGTSGSYEQYF

SEQ ID NO: 787859 - protein, 13 aa, Homo sapiens
  CDR3 for alpha chain variable domain of TCR clone 393930 (TRAV3, TRAJ30)
CAVRDRRDGKIIF

SEQ ID NO: 787860 - protein, 14 aa, Homo sapiens
  CDR3 for beta chain variable domain of TCR clone 393930 (TRBV5-1, TRBJ1-1)
CASSRTTGDTEAFF

SEQ ID NO: 787861 - protein, 15 aa, Homo sapiens
  CDR3 for alpha chain variable domain of TCR clone 393931 (TRAV9-2, TRAJ18)
CALTDRGSTLGRLYV

SEQ ID NO: 787862 - protein, 15 aa, Homo sapiens
  CDR3 for beta chain variable domain of TCR clone 393931 (TRBV19, TRBJ1-2)
CASSVGQVLNYGYTF

SEQ ID NO: 787863 - protein, 13 aa, Homo sapiens
  CDR3 for alpha chain variable domain of TCR clone 393932 (TRAV16, TRAJ9)
CALRATGGFKTIF

SEQ ID NO: 787864 - protein, 16 aa, Homo sapiens
  CDR3 for beta chain variable domain of TCR clone 393932 (TRBV5-1, TRBJ1-3)
CDSSRSGEDSGNTIYF

SEQ ID NO: 787865 - protein, 10 aa, Homo sapiens
  CDR3 for alpha chain variable domain of TCR clone 393933 (TRAV12-1, TRAJ40)
CGAYLRNLQI

SEQ ID NO: 787866 - protein, 18 aa, Homo sapiens
  CDR3 for beta chain variable domain of TCR clone 393933 (TRBV7-6, TRBJ2-1)
CASSPRTSGMGSYNEQFF

SEQ ID NO: 787867 - protein, 14 aa, Homo sapiens
  CDR3 for alpha chain variable domain of TCR clone 393934 (TRAV17, TRAJ57)
CATDPQGGSEKLVF

SEQ ID NO: 787868 - protein, 18 aa, Homo sapiens
  CDR3 for beta chain variable domain of TCR clone 393934 (TRBV7-8, TRBJ2-1)
CASSPAEGLAGGLNEQFF

SEQ ID NO: 787869 - protein, 12 aa, Homo sapiens
  CDR3 for alpha chain variable domain of TCR clone 393935 (TRAV13-1, TRAJ21)
CAAKEGFNKFYF

SEQ ID NO: 787870 - protein, 14 aa, Homo sapiens
  CDR3 for beta chain variable domain of TCR clone 393935 (TRBV2, TRBJ2-7)
CASSRDRSSYEQYF

SEQ ID NO: 787871 - protein, 13 aa, Homo sapiens
  CDR3 for alpha chain variable domain of TCR clone 393936 (TRAV20, TRAJ40)
CAAPFSGTYKYIF

SEQ ID NO: 787872 - protein, 13 aa, Homo sapiens
  CDR3 for beta chain variable domain of TCR clone 393936 (TRBV15, TRBJ2-5)
CATSQIGEENQYF

SEQ ID NO: 787873 - protein, 11 aa, Homo sapiens
  CDR3 for alpha chain variable domain of TCR clone 393937 (TRAV2, TRAJ13)
CASWRYQKVTF

SEQ ID NO: 787874 - protein, 12 aa, Homo sapiens
  CDR3 for beta chain variable domain of TCR clone 393937 (TRBV19, TRBJ2-1)
CASSRQGAEQFF

SEQ ID NO: 787875 - protein, 13 aa, Homo sapiens
  CDR3 for alpha chain variable domain of TCR clone 393938 (TRAV12-3, TRAJ13)
CAMTSGGYQKVTL

SEQ ID NO: 787876 - protein, 13 aa, Homo sapiens
  CDR3 for beta chain variable domain of TCR clone 393938 (TRBV20-1, TRBJ1-2)
CSARDQGAYGYTF

SEQ ID NO: 787877 - protein, 13 aa, Homo sapiens
  CDR3 for alpha chain variable domain of TCR clone 393939 (TRAV29/DV5, TRAJ31)
CAASRNNNARLMF

SEQ ID NO: 787878 - protein, 20 aa, Homo sapiens
  CDR3 for beta chain variable domain of TCR clone 393939 (TRBV28, TRBJ2-1)
CSSTPIGRSPGLAGGNEQFF

SEQ ID NO: 787879 - protein, 14 aa, Homo sapiens
  CDR3 for alpha chain variable domain of TCR clone 393940 (TRAV12-2, TRAJ40)
CAVNIPSGTYKYIF

SEQ ID NO: 787880 - protein, 14 aa, Homo sapiens
  CDR3 for beta chain variable domain of TCR clone 393940 (TRBV7-9, TRBJ1-2)
CASSRQGANYGYTF

SEQ ID NO: 787881 - protein, 14 aa, Homo sapiens
  CDR3 for alpha chain variable domain of TCR clone 393941 (TRAV8-4, TRAJ15)
YAVTIREAGTALIF

SEQ ID NO: 787882 - protein, 16 aa, Homo sapiens
  CDR3 for beta chain variable domain of TCR clone 393941 (TRBV7-3, TRBJ2-2)
CASSLKRGTLSGELFF

SEQ ID NO: 787883 - protein, 16 aa, Homo sapiens
  CDR3 for alpha chain variable domain of TCR clone 393942 (TRAV3, TRAJ28)
CAVLPGSGAGRYQLTF

SEQ ID NO: 787884 - protein, 14 aa, Homo sapiens
  CDR3 for beta chain variable domain of TCR clone 393942 (TRBV11-2, TRBJ1-2)
CASSLGTANYGYTF

SEQ ID NO: 787885 - protein, 16 aa, Homo sapiens
  CDR3 for alpha chain variable domain of TCR clone 393943 (TRAV30, TRAJ24)
CGTEIVDADSWGKFQF

SEQ ID NO: 787886 - protein, 15 aa, Homo sapiens
  CDR3 for beta chain variable domain of TCR clone 393943 (TRBV27, TRBJ2-1)
CASSNGGGSPNEQFF

SEQ ID NO: 787887 - protein, 15 aa, Homo sapiens
  CDR3 for alpha chain variable domain of TCR clone 393944 (TRAV8-4, TRAJ36)
CAVRKSWTGANNLFF

SEQ ID NO: 787888 - protein, 17 aa, Homo sapiens
  CDR3 for beta chain variable domain of TCR clone 393944 (TRBV3-1, TRBJ2-2)
CASSQESQGPNTGELFF

SEQ ID NO: 787889 - protein, 13 aa, Homo sapiens
  CDR3 for alpha chain variable domain of TCR clone 393945 (TRAV12-2, TRAJ9)
CAVLETGGFKTIF

SEQ ID NO: 787890 - protein, 14 aa, Homo sapiens
  CDR3 for beta chain variable domain of TCR clone 393945 (TRBV7-9, TRBJ1-1)
CASSLGGANTEAFF

SEQ ID NO: 787891 - protein, 14 aa, Homo sapiens
  CDR3 for alpha chain variable domain of TCR clone 393946 (TRAV12-2, TRAJ17)
CAVLFKAAYNKLTF

SEQ ID NO: 787892 - protein, 17 aa, Homo sapiens
  CDR3 for beta chain variable domain of TCR clone 393946 (TRBV20-1, TRBJ2-2)
CSASGSGQGGLTGELFF

SEQ ID NO: 787893 - protein, 13 aa, Homo sapiens
  CDR3 for alpha chain variable domain of TCR clone 393947 (TRAV12-2, TRAJ20)
CAVNRLDDYQLSF

SEQ ID NO: 787894 - protein, 12 aa, Homo sapiens
  CDR3 for beta chain variable domain of TCR clone 393947 (TRBV19, TRBJ2-1)
CASSQISNEQFF

SEQ ID NO: 787895 - protein, 14 aa, Homo sapiens
  CDR3 for alpha chain variable domain of TCR clone 393948 (TRAV12-3, TRAJ54)
CAMRIIQGAQKLVF

SEQ ID NO: 787896 - protein, 16 aa, Homo sapiens
  CDR3 for beta chain variable domain of TCR clone 393948 (TRBV28, TRBJ2-1)
CASRVPASGRIGEQFS

SEQ ID NO: 787897 - protein, 19 aa, Homo sapiens
  CDR3 for alpha chain variable domain of TCR clone 393949 (TRAV26-1, TRAJ28)
CIVRVAHAYSGAGSYQPTF

SEQ ID NO: 787898 - protein, 17 aa, Homo sapiens
  CDR3 for beta chain variable domain of TCR clone 393949 (TRBV4-1, TRBJ1-4)
CASSQEGPRGVEEKLFF

SEQ ID NO: 787899 - protein, 16 aa, Homo sapiens
  CDR3 for alpha chain variable domain of TCR clone 393950 (TRAV3, TRAJ40)
CAVRVRIASGTYKYIF

SEQ ID NO: 787900 - protein, 16 aa, Homo sapiens
  CDR3 for beta chain variable domain of TCR clone 393950 (TRBV2, TRBJ2-1)
CASRSPAGGKYNEQFF

SEQ ID NO: 787901 - protein, 16 aa, Homo sapiens
  CDR3 for alpha chain variable domain of TCR clone 393951 (TRAV3, TRAJ23)
CAVELLIYNQGGKLIF

SEQ ID NO: 787902 - protein, 11 aa, Homo sapiens
  CDR3 for beta chain variable domain of TCR clone 393951 (TRBV19, TRBJ1-1)
CASSIGSEAFF

SEQ ID NO: 787903 - protein, 15 aa, Homo sapiens
  CDR3 for alpha chain variable domain of TCR clone 393952 (TRAV26-1, TRAJ44)
CIVRIGTGTASKLTF

SEQ ID NO: 787904 - protein, 12 aa, Homo sapiens
  CDR3 for beta chain variable domain of TCR clone 393952 (TRBV5-1, TRBJ2-3)
CASSLAADTQYF

SEQ ID NO: 787905 - protein, 11 aa, Homo sapiens
  CDR3 for alpha chain variable domain of TCR clone 393953 (TRAV17, TRAJ36)
CAPTGANNPFF

SEQ ID NO: 787906 - protein, 12 aa, Homo sapiens
  CDR3 for beta chain variable domain of TCR clone 393953 (TRBV29-1, TRBJ2-3)
CSVAGGADTQYF

SEQ ID NO: 787907 - protein, 14 aa, Homo sapiens
  CDR3 for alpha chain variable domain of TCR clone 393954 (TRAV26-1, TRAJ44)
CIVKSTGTASKLTF

SEQ ID NO: 787908 - protein, 14 aa, Homo sapiens
  CDR3 for beta chain variable domain of TCR clone 393954 (TRBV5-7, TRBJ2-7)
CASSGGLSSYEQYF

SEQ ID NO: 787909 - protein, 14 aa, Homo sapiens
  CDR3 for alpha chain variable domain of TCR clone 393955 (TRAV35, TRAJ38)
CAGSNAGNNRKLFW

SEQ ID NO: 787910 - protein, 12 aa, Homo sapiens
  CDR3 for beta chain variable domain of TCR clone 393955 (TRBV19, TRBJ2-7)
CASTDRGYEQYF

SEQ ID NO: 787911 - protein, 14 aa, Homo sapiens
  CDR3 for alpha chain variable domain of TCR clone 393956 (TRAV26-1, TRAJ34)
CIVRESYNTDKHIF

SEQ ID NO: 787912 - protein, 13 aa, Homo sapiens
  CDR3 for beta chain variable domain of TCR clone 393956 (TRBV19, TRBJ2-1)
CATSRGVYNEQFF

SEQ ID NO: 787913 - protein, 17 aa, Homo sapiens
  CDR3 for alpha chain variable domain of TCR clone 393957 (TRAV3, TRAJ38)
CAVRDCLNAGNNRKLIW

SEQ ID NO: 787914 - protein, 13 aa, Homo sapiens
  CDR3 for beta chain variable domain of TCR clone 393957 (TRBV7-3, TRBJ1-2)
CASSLKRGYGYTF

SEQ ID NO: 787915 - protein, 16 aa, Homo sapiens
  CDR3 for alpha chain variable domain of TCR clone 393958 (TRAV1-2, TRAJ10)
CAVRGVLTGGGNKPTF

SEQ ID NO: 787916 - protein, 17 aa, Homo sapiens
  CDR3 for beta chain variable domain of TCR clone 393958 (TRBV3-1, TRBJ2-5)
CASSQDTLAGGGETQYF

SEQ ID NO: 787917 - protein, 18 aa, Homo sapiens
  CDR3 for alpha chain variable domain of TCR clone 393959 (TRAV29/DV5, TRAJ52)
CAAGFRGAGGTSYGKLTF

SEQ ID NO: 787918 - protein, 10 aa, Homo sapiens
  CDR3 for beta chain variable domain of TCR clone 393959 (TRBV2, TRBJ2-7)
CASSVYEQYF

SEQ ID NO: 787919 - protein, 14 aa, Homo sapiens
  CDR3 for alpha chain variable domain of TCR clone 393960 (TRAV1-2, TRAJ8)
CAVRDDTGFQKLVF

SEQ ID NO: 787920 - protein, 16 aa, Homo sapiens
  CDR3 for beta chain variable domain of TCR clone 393960 (TRBV7-9, TRBJ2-1)
CASSDVAGGSYNEQFF

SEQ ID NO: 787921 - protein, 19 aa, Homo sapiens
  CDR3 for alpha chain variable domain of TCR clone 393961 (TRAV29/DV5, TRAJ49)
CSVLLCSKLTVDTGKPFYF

SEQ ID NO: 787922 - protein, 15 aa, Homo sapiens
  CDR3 for beta chain variable domain of TCR clone 393961 (TRBV4-3, TRBJ2-2)
CASSQGGTPTGELFF

SEQ ID NO: 787923 - protein, 14 aa, Homo sapiens
  CDR3 for alpha chain variable domain of TCR clone 393962 (TRAV12-3, TRAJ10)
SLLPLTGGGNKLTF

SEQ ID NO: 787924 - protein, 12 aa, Homo sapiens
  CDR3 for beta chain variable domain of TCR clone 393962 (TRBV7-8, TRBJ2-7)
CASSLGDREQYF

SEQ ID NO: 787925 - protein, 13 aa, Homo sapiens
  CDR3 for alpha chain variable domain of TCR clone 393963 (TRAV12-1, TRAJ37)
CVVNAGNTGKLIF

SEQ ID NO: 787926 - protein, 14 aa, Homo sapiens
  CDR3 for beta chain variable domain of TCR clone 393963 (TRBV7-2, TRBJ2-3)
CASRWGLAADTQYF

SEQ ID NO: 787927 - protein, 14 aa, Homo sapiens
  CDR3 for alpha chain variable domain of TCR clone 393964 (TRAV29/DV5, TRAJ36)
CAARRKTGANNLLF

SEQ ID NO: 787928 - protein, 13 aa, Homo sapiens
  CDR3 for beta chain variable domain of TCR clone 393964 (TRBV12-5, TRBJ2-3)
CASGDRQSDTQYF

SEQ ID NO: 787929 - protein, 12 aa, Homo sapiens
  CDR3 for alpha chain variable domain of TCR clone 393965 (TRAV27, TRAJ9)
CAGESGGFKTIV

SEQ ID NO: 787930 - protein, 14 aa, Homo sapiens
  CDR3 for beta chain variable domain of TCR clone 393965 (TRBV6-1, TRBJ2-1)
CASGKDGFYNEQFF

SEQ ID NO: 787931 - protein, 15 aa, Homo sapiens
  CDR3 for alpha chain variable domain of TCR clone 393966 (TRAV17, TRAJ10)
CATVLLTGGGNKLTF

SEQ ID NO: 787932 - protein, 17 aa, Homo sapiens
  CDR3 for beta chain variable domain of TCR clone 393966 (TRBV11-2, TRBJ2-1)
WASSLYPPGVEYNEQFS

SEQ ID NO: 787933 - protein, 12 aa, Homo sapiens
  CDR3 for alpha chain variable domain of TCR clone 393967 (TRAV12-3, TRAJ17)
CAMTLTGNKLTF

SEQ ID NO: 787934 - protein, 17 aa, Homo sapiens
  CDR3 for beta chain variable domain of TCR clone 393967 (TRBV11-2, TRBJ2-1)
CASSLHPPGVEYNEQFF

SEQ ID NO: 787935 - protein, 12 aa, Homo sapiens
  CDR3 for alpha chain variable domain of TCR clone 393968 (TRAV12-1, TRAJ40)
CVVYSGTYKYIF

SEQ ID NO: 787936 - protein, 15 aa, Homo sapiens
  CDR3 for beta chain variable domain of TCR clone 393968 (TRBV18, TRBJ2-7)
CASSPRSGTAYEQYF

SEQ ID NO: 787937 - protein, 16 aa, Homo sapiens
  CDR3 for alpha chain variable domain of TCR clone 393969 (TRAV30, TRAJ24)
CGTEIVDADSWGKFQF

SEQ ID NO: 787938 - protein, 17 aa, Homo sapiens
  CDR3 for beta chain variable domain of TCR clone 393969 (TRBV20-1, TRBJ2-2)
CSASGSGQGGLTGELCF

SEQ ID NO: 787939 - protein, 17 aa, Homo sapiens
  CDR3 for alpha chain variable domain of TCR clone 393970 (TRAV16, TRAJ42)
CALSPKLYGVSQGNLIF

SEQ ID NO: 787940 - protein, 13 aa, Homo sapiens
  CDR3 for beta chain variable domain of TCR clone 393970 (TRBV19, TRBJ1-5)
CASSTRRDQPQHF

SEQ ID NO: 787941 - protein, 14 aa, Homo sapiens
  CDR3 for alpha chain variable domain of TCR clone 393971 (TRAV12-2, TRAJ13)
CAVKKTGVYQKVTF

SEQ ID NO: 787942 - protein, 15 aa, Homo sapiens
  CDR3 for beta chain variable domain of TCR clone 393971 (TRBV27, TRBJ2-1)
CASSNGGGSSNDQFF

SEQ ID NO: 787943 - protein, 15 aa, Homo sapiens
  CDR3 for alpha chain variable domain of TCR clone 393972 (TRAV3, TRAJ17)
CAVRDTGAAGNKLTF

SEQ ID NO: 787944 - protein, 16 aa, Homo sapiens
  CDR3 for beta chain variable domain of TCR clone 393972 (TRBV6-3, TRBJ1-1)
CASSNLLPGQKLSLDK

SEQ ID NO: 787945 - protein, 15 aa, Homo sapiens
  CDR3 for alpha chain variable domain of TCR clone 393973 (TRAV17, TRAJ16)
CATALRFSDGQKLLF

SEQ ID NO: 787946 - protein, 15 aa, Homo sapiens
  CDR3 for beta chain variable domain of TCR clone 393973 (TRBV13, TRBJ1-5)
RASSFGQGGVQPQHF

SEQ ID NO: 787947 - protein, 14 aa, Homo sapiens
  CDR3 for alpha chain variable domain of TCR clone 393974 (TRAV1-2, TRAJ8)
CAGREDTGFQKLVF

SEQ ID NO: 787948 - protein, 13 aa, Homo sapiens
  CDR3 for beta chain variable domain of TCR clone 393974 (TRBV12-4, TRBJ1-5)
CASSPDRAQPQHF

SEQ ID NO: 787949 - protein, 12 aa, Homo sapiens
  CDR3 for alpha chain variable domain of TCR clone 393975 (TRAV12-3, TRAJ40)
CAMSSGTYKYIF

SEQ ID NO: 787950 - protein, 14 aa, Homo sapiens
  CDR3 for beta chain variable domain of TCR clone 393975 (TRBV7-2, TRBJ2-2)
CASRGQGAAGELFF

SEQ ID NO: 787951 - protein, 12 aa, Homo sapiens
  CDR3 for alpha chain variable domain of TCR clone 393976 (TRAV19, TRAJ23)
CALRAWGGKLIF

SEQ ID NO: 787952 - protein, 13 aa, Homo sapiens
  CDR3 for beta chain variable domain of TCR clone 393976 (TRBV20-1, TRBJ1-1)
CSARGVGNTEAFF

SEQ ID NO: 787953 - protein, 11 aa, Homo sapiens
  CDR3 for alpha chain variable domain of TCR clone 393977 (TRAV2, TRAJ13)
CASGGYQKVTF

SEQ ID NO: 787954 - protein, 14 aa, Homo sapiens
  CDR3 for beta chain variable domain of TCR clone 393977 (TRBV13, TRBJ1-1)
CASTVITVNTEAFF

SEQ ID NO: 787955 - protein, 14 aa, Homo sapiens
  CDR3 for alpha chain variable domain of TCR clone 393978 (TRAV16, TRAJ42)
CALLAGGSQGNHIF

SEQ ID NO: 787956 - protein, 15 aa, Homo sapiens
  CDR3 for beta chain variable domain of TCR clone 393978 (TRBV7-9, TRBJ1-5)
CASSQGHQPNQPQHF

SEQ ID NO: 787957 - protein, 13 aa, Homo sapiens
  CDR3 for alpha chain variable domain of TCR clone 393979 (TRAV8-4, TRAJ40)
CAVSEGGTYKYIF

SEQ ID NO: 787958 - protein, 13 aa, Homo sapiens
  CDR3 for beta chain variable domain of TCR clone 393979 (TRBV20-1, TRBJ1-5)
CSAPGGPSQPQHF

SEQ ID NO: 787959 - protein, 17 aa, Homo sapiens
  CDR3 for alpha chain variable domain of TCR clone 393980 (TRAV8-6, TRAJ58)
CAVSSWVGETSGSRLTF

SEQ ID NO: 787960 - protein, 12 aa, Homo sapiens
  CDR3 for beta chain variable domain of TCR clone 393980 (TRBV7-9, TRBJ2-7)
CASSIKREEQYF

SEQ ID NO: 787961 - protein, 13 aa, Homo sapiens
  CDR3 for alpha chain variable domain of TCR clone 393981 (TRAV22, TRAJ12)
CAVLMDSSYKLIF

SEQ ID NO: 787962 - protein, 15 aa, Homo sapiens
  CDR3 for beta chain variable domain of TCR clone 393981 (TRBV6-3, TRBJ2-7)
CASSSPGTVFYEQYF

SEQ ID NO: 787963 - protein, 13 aa, Homo sapiens
  CDR3 for alpha chain variable domain of TCR clone 393982 (TRAV30, TRAJ24)
CGTVTDSWGKLQF

SEQ ID NO: 787964 - protein, 15 aa, Homo sapiens
  CDR3 for beta chain variable domain of TCR clone 393982 (TRBV25-1, TRBJ1-4)
CASSPGNSTNEKLFF

SEQ ID NO: 787965 - protein, 14 aa, Homo sapiens
  CDR3 for alpha chain variable domain of TCR clone 393983 (TRAV3, TRAJ9)
CAVRLNTGGFKTIF

SEQ ID NO: 787966 - protein, 16 aa, Homo sapiens
  CDR3 for beta chain variable domain of TCR clone 393983 (TRBV5-1, TRBJ2-1)
CASSIRSGGSYNEQFF

SEQ ID NO: 787967 - protein, 15 aa, Homo sapiens
  CDR3 for alpha chain variable domain of TCR clone 393984 (TRAV21, TRAJ53)
CATLNSGGSNYKMTF

SEQ ID NO: 787968 - protein, 16 aa, Homo sapiens
  CDR3 for beta chain variable domain of TCR clone 393984 (TRBV12-4, TRBJ2-5)
CASSFFVRGRQETQYF

SEQ ID NO: 787969 - protein, 14 aa, Homo sapiens
  CDR3 for alpha chain variable domain of TCR clone 393985 (TRAV1-2, TRAJ8)
CAVREDTGFQKLGV

SEQ ID NO: 787970 - protein, 13 aa, Homo sapiens
  CDR3 for beta chain variable domain of TCR clone 393985 (TRBV10-3, TRBJ1-2)
CAISERDSYGYTF

SEQ ID NO: 787971 - protein, 18 aa, Homo sapiens
  CDR3 for alpha chain variable domain of TCR clone 393986 (TRAV12-3, TRAJ52)
CAMSVGGAGGTSYGKLTF

SEQ ID NO: 787972 - protein, 16 aa, Homo sapiens
  CDR3 for beta chain variable domain of TCR clone 393986 (TRBV19, TRBJ2-3)
CASSPGAASRTDTQYF

SEQ ID NO: 787973 - protein, 15 aa, Homo sapiens
  CDR3 for alpha chain variable domain of TCR clone 393987 (TRAV3, TRAJ13)
CAERDIAGGYQKVTL

SEQ ID NO: 787974 - protein, 13 aa, Homo sapiens
  CDR3 for beta chain variable domain of TCR clone 393987 (TRBV2, TRBJ2-2)
CASSKKNTGELFF

SEQ ID NO: 787975 - protein, 13 aa, Homo sapiens
  CDR3 for alpha chain variable domain of TCR clone 393988 (TRAV21, TRAJ27)
CAALNTNAGKSTF

SEQ ID NO: 787976 - protein, 13 aa, Homo sapiens
  CDR3 for beta chain variable domain of TCR clone 393988 (TRBV10-3, TRBJ2-7)
CASKLAVNYEQYF

SEQ ID NO: 787977 - protein, 16 aa, Homo sapiens
  CDR3 for alpha chain variable domain of TCR clone 393989 (TRAV26-1, TRAJ33)
CIVPFWGEDSNYQLIW

SEQ ID NO: 787978 - protein, 12 aa, Homo sapiens
  CDR3 for beta chain variable domain of TCR clone 393989 (TRBV7-9, TRBJ2-7)
CASSFGSYEQYF

SEQ ID NO: 787979 - protein, 13 aa, Homo sapiens
  CDR3 for alpha chain variable domain of TCR clone 393990 (TRAV27, TRAJ42)
CAGARGSQGNLIF

SEQ ID NO: 787980 - protein, 16 aa, Homo sapiens
  CDR3 for beta chain variable domain of TCR clone 393990 (TRBV20-1, TRBJ1-4)
CSAPGQGLLTNEKLFF

SEQ ID NO: 787981 - protein, 16 aa, Homo sapiens
  CDR3 for alpha chain variable domain of TCR clone 393991 (TRAV30, TRAJ24)
CGTEMVDAESWGKFQF

SEQ ID NO: 787982 - protein, 14 aa, Homo sapiens
  CDR3 for beta chain variable domain of TCR clone 393991 (TRBV12-5, TRBJ2-5)
CASGSRTHQETQYF

SEQ ID NO: 787983 - protein, 14 aa, Homo sapiens
  CDR3 for alpha chain variable domain of TCR clone 393992 (TRAV1-2, TRAJ8)
CAVREDTGFQKFVF

SEQ ID NO: 787984 - protein, 12 aa, Homo sapiens
  CDR3 for beta chain variable domain of TCR clone 393992 (TRBV29-1, TRBJ2-3)
CSVTGGAETQYF

SEQ ID NO: 787985 - protein, 11 aa, Homo sapiens
  CDR3 for alpha chain variable domain of TCR clone 393993 (TRAV2, TRAJ40)
CAVEDPGNLLI

SEQ ID NO: 787986 - protein, 14 aa, Homo sapiens
  CDR3 for beta chain variable domain of TCR clone 393993 (TRBV19, TRBJ2-2)
CASSTLHRSGELFF

SEQ ID NO: 787987 - protein, 14 aa, Homo sapiens
  CDR3 for alpha chain variable domain of TCR clone 393994 (TRAV16, TRAJ17)
CALSGRAAGNKLTF

SEQ ID NO: 787988 - protein, 15 aa, Homo sapiens
  CDR3 for beta chain variable domain of TCR clone 393994 (TRBV14, TRBJ1-1)
CASSLSRPGATEAFF

SEQ ID NO: 787989 - protein, 13 aa, Homo sapiens
  CDR3 for alpha chain variable domain of TCR clone 393995 (TRAV21, TRAJ15)
CAVANQAGTALIF

SEQ ID NO: 787990 - protein, 15 aa, Homo sapiens
  CDR3 for beta chain variable domain of TCR clone 393995 (TRBV27, TRBJ2-7)
CASSLGSSVRPEQYF

SEQ ID NO: 787991 - protein, 15 aa, Homo sapiens
  CDR3 for alpha chain variable domain of TCR clone 393996 (TRAV12-2, TRAJ53)
CVVNGGGGSNYKLTF

SEQ ID NO: 787992 - protein, 13 aa, Homo sapiens
  CDR3 for beta chain variable domain of TCR clone 393996 (TRBV3-1, TRBJ1-1)
CASSPGVITEAFF

SEQ ID NO: 787993 - protein, 14 aa, Homo sapiens
  CDR3 for alpha chain variable domain of TCR clone 393997 (TRAV4, TRAJ17)
CLVGDMAAGNKLTF

SEQ ID NO: 787994 - protein, 14 aa, Homo sapiens
  CDR3 for beta chain variable domain of TCR clone 393997 (TRBV7-2, TRBJ2-7)
CASSSISGFSEQYF

SEQ ID NO: 787995 - protein, 16 aa, Homo sapiens
  CDR3 for alpha chain variable domain of TCR clone 393998 (TRAV30, TRAJ24)
CGTQIVDADSWGKFQF

SEQ ID NO: 787996 - protein, 15 aa, Homo sapiens
  CDR3 for beta chain variable domain of TCR clone 393998 (TRBV20-1, TRBJ2-7)
CSARDRVSGMDEQYF

SEQ ID NO: 787997 - protein, 14 aa, Homo sapiens
  CDR3 for alpha chain variable domain of TCR clone 393999 (TRAV1-2, TRAJ16)
CAVNRFSDGQKLLV

SEQ ID NO: 787998 - protein, 16 aa, Homo sapiens
  CDR3 for beta chain variable domain of TCR clone 393999 (TRBV19, TRBJ2-1)
CASSKAGPSSYNEQFF

SEQ ID NO: 787999 - protein, 12 aa, Homo sapiens
  CDR3 for alpha chain variable domain of TCR clone 394000 (TRAV20, TRAJ54)
CAVQEGAQKLVF

SEQ ID NO: 788000 - protein, 17 aa, Homo sapiens
  CDR3 for beta chain variable domain of TCR clone 394000 (TRBV13, TRBJ2-3)
CASRLSRVAGGRNTQYF

SEQ ID NO: 788001 - protein, 14 aa, Homo sapiens
  CDR3 for alpha chain variable domain of TCR clone 394001 (TRAV16, TRAJ26)
CALSSANYGQNFVF

SEQ ID NO: 788002 - protein, 14 aa, Homo sapiens
  CDR3 for beta chain variable domain of TCR clone 394001 (TRBV5-4, TRBJ1-1)
CASSLDSRRDEAFF

SEQ ID NO: 788003 - protein, 14 aa, Homo sapiens
  CDR3 for alpha chain variable domain of TCR clone 394002 (TRAV4, TRAJ20)
CLVGDFTNDYKLSF

SEQ ID NO: 788004 - protein, 15 aa, Homo sapiens
  CDR3 for beta chain variable domain of TCR clone 394002 (TRBV6-5, TRBJ1-1)
CASSYLRGSVPEAFF

SEQ ID NO: 788005 - protein, 12 aa, Homo sapiens
  CDR3 for alpha chain variable domain of TCR clone 394003 (TRAV8-6, TRAJ15)
CAASSRGAALIF

SEQ ID NO: 788006 - protein, 16 aa, Homo sapiens
  CDR3 for beta chain variable domain of TCR clone 394003 (TRBV28, TRBJ1-4)
CASSPPYRGRSEKLFF

SEQ ID NO: 788007 - protein, 12 aa, Homo sapiens
  CDR3 for alpha chain variable domain of TCR clone 394004 (TRAV12-2, TRAJ10)
WGVTGGGNKLTF

SEQ ID NO: 788008 - protein, 15 aa, Homo sapiens
  CDR3 for beta chain variable domain of TCR clone 394004 (TRBV20-1, TRBJ2-7)
CSARDRVSGIDEQYF

SEQ ID NO: 788009 - protein, 12 aa, Homo sapiens
  CDR3 for alpha chain variable domain of TCR clone 394005 (TRAV36/DV7, TRAJ53)
CNSGGSNYKLTF

SEQ ID NO: 788010 - protein, 12 aa, Homo sapiens
  CDR3 for beta chain variable domain of TCR clone 394005 (TRBV18, TRBJ2-3)
CASSPLSDTQYF

SEQ ID NO: 788011 - protein, 17 aa, Homo sapiens
  CDR3 for alpha chain variable domain of TCR clone 394006 (TRAV8-4, TRAJ45)
CAVRTRGSRRRCGRTHL

SEQ ID NO: 788012 - protein, 16 aa, Homo sapiens
  CDR3 for beta chain variable domain of TCR clone 394006 (TRBV4-2, TRBJ2-3)
CASSQELAGDTDTQYF

SEQ ID NO: 788013 - protein, 14 aa, Homo sapiens
  CDR3 for alpha chain variable domain of TCR clone 394007 (TRAV8-3, TRAJ9)
CAVVCNTGDFKTIF

SEQ ID NO: 788014 - protein, 14 aa, Homo sapiens
  CDR3 for beta chain variable domain of TCR clone 394007 (TRBV7-3, TRBJ2-2)
CASSSGGYTGELFF

SEQ ID NO: 788015 - protein, 18 aa, Homo sapiens
  CDR3 for alpha chain variable domain of TCR clone 394008 (TRAV12-3, TRAJ52)
CAMSVGGAGGTSYGKLTF

SEQ ID NO: 788016 - protein, 16 aa, Homo sapiens
  CDR3 for beta chain variable domain of TCR clone 394008 (TRBV15, TRBJ2-5)
CATSRYLEAAQETQYF

SEQ ID NO: 788017 - protein, 17 aa, Homo sapiens
  CDR3 for alpha chain variable domain of TCR clone 394009 (TRAV4, TRAJ18)
CLVGERSVGSTLGRLYF

SEQ ID NO: 788018 - protein, 14 aa, Homo sapiens
  CDR3 for beta chain variable domain of TCR clone 394009 (TRBV19, TRBJ1-2)
CASSIGAGSYGYTF

SEQ ID NO: 788019 - protein, 15 aa, Homo sapiens
  CDR3 for alpha chain variable domain of TCR clone 394010 (TRAV3, TRAJ3)
CAVRDRRSSASKIIF

SEQ ID NO: 788020 - protein, 15 aa, Homo sapiens
  CDR3 for beta chain variable domain of TCR clone 394010 (TRBV7-9, TRBJ2-1)
CASSLGWGRANEQFF

SEQ ID NO: 788021 - protein, 17 aa, Homo sapiens
  CDR3 for alpha chain variable domain of TCR clone 394011 (TRAV3, TRAJ42)
CAVRDRDYGGSQGNLIF

SEQ ID NO: 788022 - protein, 14 aa, Homo sapiens
  CDR3 for beta chain variable domain of TCR clone 394011 (TRBV7-8, TRBJ2-3)
CASSFPDGQDTQYF

SEQ ID NO: 788023 - protein, 17 aa, Homo sapiens
  CDR3 for alpha chain variable domain of TCR clone 394012 (TRAV3, TRAJ6)
CAVRDGPRAGGSYIPKF

SEQ ID NO: 788024 - protein, 14 aa, Homo sapiens
  CDR3 for beta chain variable domain of TCR clone 394012 (TRBV7-2, TRBJ2-7)
CASSPNTSFYEQYF

SEQ ID NO: 788025 - protein, 11 aa, Homo sapiens
  CDR3 for alpha chain variable domain of TCR clone 394013 (TRAV21, TRAJ39)
LLVNAGNMLTF

SEQ ID NO: 788026 - protein, 15 aa, Homo sapiens
  CDR3 for beta chain variable domain of TCR clone 394013 (TRBV19, TRBJ1-5)
CASSIVWADNQPQHF

SEQ ID NO: 788027 - protein, 12 aa, Homo sapiens
  CDR3 for alpha chain variable domain of TCR clone 394014 (TRAV21, TRAJ31)
CVLAGNNARLMF

SEQ ID NO: 788028 - protein, 14 aa, Homo sapiens
  CDR3 for beta chain variable domain of TCR clone 394014 (TRBV7-3, TRBJ1-1)
CASSLGTGYTEAFF

SEQ ID NO: 788029 - protein, 15 aa, Homo sapiens
  CDR3 for alpha chain variable domain of TCR clone 394015 (TRAV14/DV4, TRAJ48)
CAMREGNAGNEKLTF

SEQ ID NO: 788030 - protein, 14 aa, Homo sapiens
  CDR3 for beta chain variable domain of TCR clone 394015 (TRBV28, TRBJ1-5)
CASSGQALYEPQHF

SEQ ID NO: 788031 - protein, 12 aa, Homo sapiens
  CDR3 for alpha chain variable domain of TCR clone 394016 (TRAV23/DV6, TRAJ31)
CAARRIGARLMF

SEQ ID NO: 788032 - protein, 13 aa, Homo sapiens
  CDR3 for beta chain variable domain of TCR clone 394016 (TRBV28, TRBJ2-7)
CASKAGGVYEHYF

SEQ ID NO: 788033 - protein, 14 aa, Homo sapiens
  CDR3 for alpha chain variable domain of TCR clone 394017 (TRAV14/DV4, TRAJ20)
CAMRESLNDYKLSF

SEQ ID NO: 788034 - protein, 14 aa, Homo sapiens
  CDR3 for beta chain variable domain of TCR clone 394017 (TRBV20-1, TRBJ1-1)
CSAQTRIGGTEAFF

SEQ ID NO: 788035 - protein, 14 aa, Homo sapiens
  CDR3 for alpha chain variable domain of TCR clone 394018 (TRAV29/DV5, TRAJ36)
CAARRKTGANNLFF

SEQ ID NO: 788036 - protein, 15 aa, Homo sapiens
  CDR3 for beta chain variable domain of TCR clone 394018 (TRBV7-8, TRBJ2-1)
CASSLADSLYNEQFL

SEQ ID NO: 788037 - protein, 12 aa, Homo sapiens
  CDR3 for alpha chain variable domain of TCR clone 394019 (TRAV3, TRAJ26)
CAVRDYGQNFVF

SEQ ID NO: 788038 - protein, 15 aa, Homo sapiens
  CDR3 for beta chain variable domain of TCR clone 394019 (TRBV5-7, TRBJ2-7)
CASSLGPGRGHEQYF

SEQ ID NO: 788039 - protein, 11 aa, Homo sapiens
  CDR3 for alpha chain variable domain of TCR clone 394020 (TRAV35, TRAJ34)
CWARNTDKLIF

SEQ ID NO: 788040 - protein, 14 aa, Homo sapiens
  CDR3 for beta chain variable domain of TCR clone 394020 (TRBV3-1, TRBJ1-1)
CASSQYRVGTEAFF

SEQ ID NO: 788041 - protein, 11 aa, Homo sapiens
  CDR3 for alpha chain variable domain of TCR clone 394021 (TRAV12-1, TRAJ43)
CVEYDNNDMRF

SEQ ID NO: 788042 - protein, 15 aa, Homo sapiens
  CDR3 for beta chain variable domain of TCR clone 394021 (TRBV18, TRBJ2-5)
CASSPRVSEAETQYF

SEQ ID NO: 788043 - protein, 13 aa, Homo sapiens
  CDR3 for alpha chain variable domain of TCR clone 394022 (TRAV3, TRAJ17)
CSPRGAAGNKLTF

SEQ ID NO: 788044 - protein, 12 aa, Homo sapiens
  CDR3 for beta chain variable domain of TCR clone 394022 (TRBV11-2, TRBJ2-2)
CASSLGGGELFF

SEQ ID NO: 788045 - protein, 17 aa, Homo sapiens
  CDR3 for alpha chain variable domain of TCR clone 394023 (TRAV3, TRAJ42)
CAVRDRDYGGSRGNLIF

SEQ ID NO: 788046 - protein, 15 aa, Homo sapiens
  CDR3 for beta chain variable domain of TCR clone 394023 (TRBV6-6, TRBJ2-7)
CASSYWYGGSYEQYF

SEQ ID NO: 788047 - protein, 11 aa, Homo sapiens
  CDR3 for alpha chain variable domain of TCR clone 394024 (TRAV3, TRAJ21)
CAVGNFNKFYF

SEQ ID NO: 788048 - protein, 16 aa, Homo sapiens
  CDR3 for beta chain variable domain of TCR clone 394024 (TRBV19, TRBJ2-1)
CASSKAGPSSYNEQFL

SEQ ID NO: 788049 - protein, 15 aa, Homo sapiens
  CDR3 for alpha chain variable domain of TCR clone 394025 (TRAV3, TRAJ17)
CALSPKEAAGNKLTF

SEQ ID NO: 788050 - protein, 13 aa, Homo sapiens
  CDR3 for beta chain variable domain of TCR clone 394025 (TRBV24-1, TRBJ2-2)
CATSDWSTGELFF

SEQ ID NO: 788051 - protein, 14 aa, Homo sapiens
  CDR3 for alpha chain variable domain of TCR clone 394026 (TRAV12-2, TRAJ13)
CAVKKTGGYQQVTF

SEQ ID NO: 788052 - protein, 12 aa, Homo sapiens
  CDR3 for beta chain variable domain of TCR clone 394026 (TRBV2, TRBJ2-1)
CAYGPPGNEQFF

SEQ ID NO: 788053 - protein, 16 aa, Homo sapiens
  CDR3 for alpha chain variable domain of TCR clone 394027 (TRAV29/DV5, TRAJ22)
CAASASTSGSARQLNF

SEQ ID NO: 788054 - protein, 14 aa, Homo sapiens
  CDR3 for beta chain variable domain of TCR clone 394027 (TRBV4-1, TRBJ2-2)
CASSQAVNTGELFF

SEQ ID NO: 788055 - protein, 15 aa, Homo sapiens
  CDR3 for alpha chain variable domain of TCR clone 394028 (TRAV35, TRAJ58)
CAGRRQETSGSRLTF

SEQ ID NO: 788056 - protein, 11 aa, Homo sapiens
  CDR3 for beta chain variable domain of TCR clone 394028 (TRBV11-2, TRBJ1-1)
CARSINTEAFF

SEQ ID NO: 788057 - protein, 17 aa, Homo sapiens
  CDR3 for alpha chain variable domain of TCR clone 394029 (TRAV3, TRAJ6)
CAVRDGPRAGGSYIPTF

SEQ ID NO: 788058 - protein, 14 aa, Homo sapiens
  CDR3 for beta chain variable domain of TCR clone 394029 (TRBV7-2, TRBJ2-7)
CASSHKTSFYEQYF

SEQ ID NO: 788059 - protein, 14 aa, Homo sapiens
  CDR3 for alpha chain variable domain of TCR clone 394030 (TRAV8-3, TRAJ20)
CAVGPRSNDYKLSF

SEQ ID NO: 788060 - protein, 11 aa, Homo sapiens
  CDR3 for beta chain variable domain of TCR clone 394030 (TRBV10-3, TRBJ2-2)
CATKGTGELFF

SEQ ID NO: 788061 - protein, 23 aa, Homo sapiens
  CDR3 for alpha chain variable domain of TCR clone 394031 (TRAV26-1, TRAJ38)
CIADNAGNNHIRNPDPAVYQLRD

SEQ ID NO: 788062 - protein, 13 aa, Homo sapiens
  CDR3 for beta chain variable domain of TCR clone 394031 (TRBV20-1, TRBJ1-1)
CSARGGGSTEAFF

SEQ ID NO: 788063 - protein, 11 aa, Homo sapiens
  CDR3 for alpha chain variable domain of TCR clone 394032 (TRAV1-1, TRAJ30)
CAQNRDDKIIF

SEQ ID NO: 788064 - protein, 15 aa, Homo sapiens
  CDR3 for beta chain variable domain of TCR clone 394032 (TRBV7-9, TRBJ1-6)
CASSSPGRGNSPLHF

SEQ ID NO: 788065 - protein, 14 aa, Homo sapiens
  CDR3 for alpha chain variable domain of TCR clone 394033 (TRAV23/DV6, TRAJ45)
CAVYSGGGADGLTF

SEQ ID NO: 788066 - protein, 20 aa, Homo sapiens
  CDR3 for beta chain variable domain of TCR clone 394033 (TRBV7-8, TRBJ2-2)
CASSHLFPGPTVHITGELFF

SEQ ID NO: 788067 - protein, 13 aa, Homo sapiens
  CDR3 for alpha chain variable domain of TCR clone 394034 (TRAV36/DV7, TRAJ54)
CAVLIQGAQKLVF

SEQ ID NO: 788068 - protein, 12 aa, Homo sapiens
  CDR3 for beta chain variable domain of TCR clone 394034 (TRBV11-2, TRBJ2-2)
CASSLGGGELFF

SEQ ID NO: 788069 - protein, 15 aa, Homo sapiens
  CDR3 for alpha chain variable domain of TCR clone 394035 (TRAV26-1, TRAJ15)
CIVRAANQAGTALIF

SEQ ID NO: 788070 - protein, 16 aa, Homo sapiens
  CDR3 for beta chain variable domain of TCR clone 394035 (TRBV15, TRBJ1-2)
CATSRGPRTGGGGYTF

SEQ ID NO: 788071 - protein, 14 aa, Homo sapiens
  CDR3 for alpha chain variable domain of TCR clone 394036 (TRAV12-3, TRAJ42)
CAMNYGGSQGNLIF

SEQ ID NO: 788072 - protein, 13 aa, Homo sapiens
  CDR3 for beta chain variable domain of TCR clone 394036 (TRBV7-2, TRBJ2-2)
CASSLAVTGELFF

SEQ ID NO: 788073 - protein, 11 aa, Homo sapiens
  CDR3 for alpha chain variable domain of TCR clone 394037 (TRAV12-1, TRAJ34)
CVVNKGRELIF

SEQ ID NO: 788074 - protein, 12 aa, Homo sapiens
  CDR3 for beta chain variable domain of TCR clone 394037 (TRBV2, TRBJ2-1)
CAYGLPGNEQFF

SEQ ID NO: 788075 - protein, 12 aa, Homo sapiens
  CDR3 for alpha chain variable domain of TCR clone 394038 (TRAV12-1, TRAJ30)
CVVNPRYDKIIF

SEQ ID NO: 788076 - protein, 18 aa, Homo sapiens
  CDR3 for beta chain variable domain of TCR clone 394038 (TRBV5-1, TRBJ2-7)
CASSLAGFGGMSSYEQYF

SEQ ID NO: 788077 - protein, 12 aa, Homo sapiens
  CDR3 for alpha chain variable domain of TCR clone 394039 (TRAV13-2, TRAJ23)
CAERHRRGKLIF

SEQ ID NO: 788078 - protein, 16 aa, Homo sapiens
  CDR3 for beta chain variable domain of TCR clone 394039 (TRBV2, TRBJ2-3)
CASSTSVEGVTDTQYF

SEQ ID NO: 788079 - protein, 13 aa, Homo sapiens
  CDR3 for alpha chain variable domain of TCR clone 394040 (TRAV13-1, TRAJ53)
QAASGGSNYKLTF

SEQ ID NO: 788080 - protein, 15 aa, Homo sapiens
  CDR3 for beta chain variable domain of TCR clone 394040 (TRBV5-1, TRBJ2-1)
CASSPPRAAYNEQFF

SEQ ID NO: 788081 - protein, 16 aa, Homo sapiens
  CDR3 for alpha chain variable domain of TCR clone 394041 (TRAV30, TRAJ24)
CGTEIVDADSWGIFQF

SEQ ID NO: 788082 - protein, 15 aa, Homo sapiens
  CDR3 for beta chain variable domain of TCR clone 394041 (TRBV20-1, TRBJ2-7)
CSARDRVSGMDEQYF

SEQ ID NO: 788083 - protein, 13 aa, Homo sapiens
  CDR3 for alpha chain variable domain of TCR clone 394042 (TRAV1-2, TRAJ12)
CAVSMDSSYELIF

SEQ ID NO: 788084 - protein, 14 aa, Homo sapiens
  CDR3 for beta chain variable domain of TCR clone 394042 (TRBV19, TRBJ2-1)
CASSSGRDYNEQFF

SEQ ID NO: 788085 - protein, 13 aa, Homo sapiens
  CDR3 for alpha chain variable domain of TCR clone 394043 (TRAV23/DV6, TRAJ34)
CAASMEGTDKLIF

SEQ ID NO: 788086 - protein, 15 aa, Homo sapiens
  CDR3 for beta chain variable domain of TCR clone 394043 (TRBV20-1, TRBJ2-7)
CSAESGTSGAYEQYF

SEQ ID NO: 788087 - protein, 12 aa, Homo sapiens
  CDR3 for alpha chain variable domain of TCR clone 394044 (TRAV13-1, TRAJ3)
CAATGVQQCFQD

SEQ ID NO: 788088 - protein, 15 aa, Homo sapiens
  CDR3 for beta chain variable domain of TCR clone 394044 (TRBV7-3, TRBJ2-2)
CQQLKAGTLSGELFF

SEQ ID NO: 788089 - protein, 11 aa, Homo sapiens
  CDR3 for alpha chain variable domain of TCR clone 394045 (TRAV1-2, TRAJ40)
CAVPGTYKYIF

SEQ ID NO: 788090 - protein, 15 aa, Homo sapiens
  CDR3 for beta chain variable domain of TCR clone 394045 (TRBV6-1, TRBJ2-1)
CASSELRGQYNEQFF

SEQ ID NO: 788091 - protein, 11 aa, Homo sapiens
  CDR3 for alpha chain variable domain of TCR clone 394046 (TRAV13-1, TRAJ39)
CASHAGNMLTF

SEQ ID NO: 788092 - protein, 11 aa, Homo sapiens
  CDR3 for beta chain variable domain of TCR clone 394046 (TRBV11-2, TRBJ2-2)
CASSLPGELFF

SEQ ID NO: 788093 - protein, 12 aa, Homo sapiens
  CDR3 for alpha chain variable domain of TCR clone 394047 (TRAV13-1, TRAJ20)
CAAPMGFTSLAL

SEQ ID NO: 788094 - protein, 14 aa, Homo sapiens
  CDR3 for beta chain variable domain of TCR clone 394047 (TRBV28, TRBJ2-5)
CASTGAGGVETQYF

SEQ ID NO: 788095 - protein, 11 aa, Homo sapiens
  CDR3 for alpha chain variable domain of TCR clone 394048 (TRAV2, TRAJ33)
CAVESNYQLIW

SEQ ID NO: 788096 - protein, 12 aa, Homo sapiens
  CDR3 for beta chain variable domain of TCR clone 394048 (TRBV3-1, TRBJ2-1)
CASSQGSSGQFF

SEQ ID NO: 788097 - protein, 16 aa, Homo sapiens
  CDR3 for alpha chain variable domain of TCR clone 394049 (TRAV3, TRAJ6)
CAVRDGPRAGSYIPTF

SEQ ID NO: 788098 - protein, 14 aa, Homo sapiens
  CDR3 for beta chain variable domain of TCR clone 394049 (TRBV7-2, TRBJ2-7)
RASSPKTSFYEQYF

SEQ ID NO: 788099 - protein, 23 aa, Homo sapiens
  CDR3 for alpha chain variable domain of TCR clone 394050 (TRAV1-1, TRAJ11)
LLQELQMKDSASYFCAGYSTLTF

SEQ ID NO: 788100 - protein, 15 aa, Homo sapiens
  CDR3 for beta chain variable domain of TCR clone 394050 (TRBV6-1, TRBJ2-5)
CASSEGWGIQETQYF

SEQ ID NO: 788101 - protein, 11 aa, Homo sapiens
  CDR3 for alpha chain variable domain of TCR clone 394051 (TRAV12-1, TRAJ21)
CVVYNFNKFYF

SEQ ID NO: 788102 - protein, 11 aa, Homo sapiens
  CDR3 for beta chain variable domain of TCR clone 394051 (TRBV29-1, TRBJ2-5)
CSEDRTGTQYF

SEQ ID NO: 788103 - protein, 17 aa, Homo sapiens
  CDR3 for alpha chain variable domain of TCR clone 394052 (TRAV38-1, TRAJ54)
CAFMKPTGLQGAQKLVF

SEQ ID NO: 788104 - protein, 14 aa, Homo sapiens
  CDR3 for beta chain variable domain of TCR clone 394052 (TRBV7-2, TRBJ2-5)
CASSPRGSSETQYF

SEQ ID NO: 788105 - protein, 12 aa, Homo sapiens
  CDR3 for alpha chain variable domain of TCR clone 394053 (TRAV12-2, TRAJ10)
WGVTGGGNKLTF

SEQ ID NO: 788106 - protein, 20 aa, Homo sapiens
  CDR3 for beta chain variable domain of TCR clone 394053 (TRBV19, TRBJ2-1)
CASSISWTVTSTRLNNEQFF

SEQ ID NO: 788107 - protein, 13 aa, Homo sapiens
  CDR3 for alpha chain variable domain of TCR clone 394054 (TRAV12-2, TRAJ42)
CAVKRGSQVNLIF

SEQ ID NO: 788108 - protein, 13 aa, Homo sapiens
  CDR3 for beta chain variable domain of TCR clone 394054 (TRBV18, TRBJ2-5)
CASSLQGQETQYF

SEQ ID NO: 788109 - protein, 15 aa, Homo sapiens
  CDR3 for alpha chain variable domain of TCR clone 394055 (TRAV17, TRAJ57)
CATGPSPCGSEKLVF

SEQ ID NO: 788110 - protein, 15 aa, Homo sapiens
  CDR3 for beta chain variable domain of TCR clone 394055 (TRBV25-1, TRBJ1-4)
CASSPGDSTNEKLFF

SEQ ID NO: 788111 - protein, 13 aa, Homo sapiens
  CDR3 for alpha chain variable domain of TCR clone 394056 (TRAV27, TRAJ53)
CAGQGGSNYKLTF

SEQ ID NO: 788112 - protein, 13 aa, Homo sapiens
  CDR3 for beta chain variable domain of TCR clone 394056 (TRBV29-1, TRBJ1-1)
CSVESGFGAEAFF

SEQ ID NO: 788113 - protein, 13 aa, Homo sapiens
  CDR3 for alpha chain variable domain of TCR clone 394057 (TRAV12-3, TRAJ33)
CAMSVNSNYQLIL

SEQ ID NO: 788114 - protein, 16 aa, Homo sapiens
  CDR3 for beta chain variable domain of TCR clone 394057 (TRBV13, TRBJ2-5)
CASSLRTGGSWETQYF

SEQ ID NO: 788115 - protein, 15 aa, Homo sapiens
  CDR3 for alpha chain variable domain of TCR clone 394058 (TRAV13-1, TRAJ57)
QVPPLSQGGSEKLVF

SEQ ID NO: 788116 - protein, 20 aa, Homo sapiens
  CDR3 for beta chain variable domain of TCR clone 394058 (TRBV28, TRBJ2-1)
CASTPIGRSPGLAGGNEQFF

SEQ ID NO: 788117 - protein, 12 aa, Homo sapiens
  CDR3 for alpha chain variable domain of TCR clone 394059 (TRAV16, TRAJ10)
CSRTGGGNKLTF

SEQ ID NO: 788118 - protein, 12 aa, Homo sapiens
  CDR3 for beta chain variable domain of TCR clone 394059 (TRBV19, TRBJ1-5)
CASSIAQQHQHF

SEQ ID NO: 788119 - protein, 14 aa, Homo sapiens
  CDR3 for alpha chain variable domain of TCR clone 394060 (TRAV17, TRAJ37)
CATDGFSNTGKLIF

SEQ ID NO: 788120 - protein, 13 aa, Homo sapiens
  CDR3 for beta chain variable domain of TCR clone 394060 (TRBV11-2, TRBJ2-1)
CASSLDLVNEQFF

SEQ ID NO: 788121 - protein, 13 aa, Homo sapiens
  CDR3 for alpha chain variable domain of TCR clone 394061 (TRAV12-2, TRAJ52)
CAAHGTSYGKLPF

SEQ ID NO: 788122 - protein, 15 aa, Homo sapiens
  CDR3 for beta chain variable domain of TCR clone 394061 (TRBV10-3, TRBJ2-7)
CAISTFSGVKGEQYF

SEQ ID NO: 788123 - protein, 11 aa, Homo sapiens
  CDR3 for alpha chain variable domain of TCR clone 394062 (TRAV1-1, TRAJ23)
CAVRQGGKLIF

SEQ ID NO: 788124 - protein, 13 aa, Homo sapiens
  CDR3 for beta chain variable domain of TCR clone 394062 (TRBV11-2, TRBJ2-5)
CPSSRGPSETQYF

SEQ ID NO: 788125 - protein, 15 aa, Homo sapiens
  CDR3 for alpha chain variable domain of TCR clone 394063 (TRAV12-1, TRAJ4)
CVVNPFSGGYNKLLF

SEQ ID NO: 788126 - protein, 16 aa, Homo sapiens
  CDR3 for beta chain variable domain of TCR clone 394063 (TRBV7-9, TRBJ1-2)
CASSLGFSSGEDGYTF

SEQ ID NO: 788127 - protein, 15 aa, Homo sapiens
  CDR3 for alpha chain variable domain of TCR clone 394064 (TRAV3, TRAJ5)
CAVRDRKTGRRALTF

SEQ ID NO: 788128 - protein, 13 aa, Homo sapiens
  CDR3 for beta chain variable domain of TCR clone 394064 (TRBV24-1, TRBJ2-2)
CATSDWSTGELFF

SEQ ID NO: 788129 - protein, 13 aa, Homo sapiens
  CDR3 for alpha chain variable domain of TCR clone 394065 (TRAV16, TRAJ26)
CITVLCLGQNFVF

SEQ ID NO: 788130 - protein, 12 aa, Homo sapiens
  CDR3 for beta chain variable domain of TCR clone 394065 (TRBV28, TRBJ1-2)
CASSLTTGGYTF

SEQ ID NO: 788131 - protein, 13 aa, Homo sapiens
  CDR3 for alpha chain variable domain of TCR clone 394066 (TRAV22, TRAJ29)
FAVVGSGNTPLVF

SEQ ID NO: 788132 - protein, 13 aa, Homo sapiens
  CDR3 for beta chain variable domain of TCR clone 394066 (TRBV4-2, TRBJ1-1)
CASSQAGNTEAFF

SEQ ID NO: 788133 - protein, 12 aa, Homo sapiens
  CDR3 for alpha chain variable domain of TCR clone 394067 (TRAV12-3, TRAJ17)
CAMTLTGNKLTF

SEQ ID NO: 788134 - protein, 15 aa, Homo sapiens
  CDR3 for beta chain variable domain of TCR clone 394067 (TRBV20-1, TRBJ2-7)
CSARDRVSGMGEHYF

SEQ ID NO: 788135 - protein, 14 aa, Homo sapiens
  CDR3 for alpha chain variable domain of TCR clone 394068 (TRAV12-2, TRAJ5)
CAVNRSRAGEHLLF

SEQ ID NO: 788136 - protein, 12 aa, Homo sapiens
  CDR3 for beta chain variable domain of TCR clone 394068 (TRBV19, TRBJ1-5)
CASSIAQQPQHF

SEQ ID NO: 788137 - protein, 16 aa, Homo sapiens
  CDR3 for alpha chain variable domain of TCR clone 394069 (TRAV3, TRAJ10)
CAVRDMRAGGGNKIPF

SEQ ID NO: 788138 - protein, 12 aa, Homo sapiens
  CDR3 for beta chain variable domain of TCR clone 394069 (TRBV11-2, TRBJ2-2)
CASSLPTGELFF

SEQ ID NO: 788139 - protein, 14 aa, Homo sapiens
  CDR3 for alpha chain variable domain of TCR clone 394070 (TRAV4, TRAJ26)
CLVGLHNYGQNFVF

SEQ ID NO: 788140 - protein, 17 aa, Homo sapiens
  CDR3 for beta chain variable domain of TCR clone 394070 (TRBV24-1, TRBJ2-1)
CATSDVSTSGTYNEQFF

SEQ ID NO: 788141 - protein, 16 aa, Homo sapiens
  CDR3 for alpha chain variable domain of TCR clone 394071 (TRAV13-1, TRAJ42)
CAASMNYGGSQGNLIF

SEQ ID NO: 788142 - protein, 14 aa, Homo sapiens
  CDR3 for beta chain variable domain of TCR clone 394071 (TRBV7-6, TRBJ2-3)
CASSVAGGTDTQYF

SEQ ID NO: 788143 - protein, 10 aa, Homo sapiens
  CDR3 for alpha chain variable domain of TCR clone 394072 (TRAV30, TRAJ48)
CGIGNEKLTF

SEQ ID NO: 788144 - protein, 15 aa, Homo sapiens
  CDR3 for beta chain variable domain of TCR clone 394072 (TRBV28, TRBJ2-2)
CASRLQGVGTGELFF

SEQ ID NO: 788145 - protein, 12 aa, Homo sapiens
  CDR3 for alpha chain variable domain of TCR clone 394073 (TRAV12-3, TRAJ41)
CAMSYSGYALNF

SEQ ID NO: 788146 - protein, 15 aa, Homo sapiens
  CDR3 for beta chain variable domain of TCR clone 394073 (TRBV5-1, TRBJ2-1)
CASSPPRAPYNEHFF

SEQ ID NO: 788147 - protein, 12 aa, Homo sapiens
  CDR3 for alpha chain variable domain of TCR clone 394074 (TRAV13-1, TRAJ15)
CAASQAGTARIF

SEQ ID NO: 788148 - protein, 18 aa, Homo sapiens
  CDR3 for beta chain variable domain of TCR clone 394074 (TRBV7-9, TRBJ2-3)
CASSLPINGQIGTDTQYF

SEQ ID NO: 788149 - protein, 13 aa, Homo sapiens
  CDR3 for alpha chain variable domain of TCR clone 394075 (TRAV27, TRAJ6)
CAGGRRGSYIPTF

SEQ ID NO: 788150 - protein, 14 aa, Homo sapiens
  CDR3 for beta chain variable domain of TCR clone 394075 (TRBV20-1, TRBJ2-4)
CSASGRVGENIQYF

SEQ ID NO: 788151 - protein, 18 aa, Homo sapiens
  CDR3 for alpha chain variable domain of TCR clone 394076 (TRAV13-1, TRAJ52)
CAAKNPNAGGTSYGKLTF

SEQ ID NO: 788152 - protein, 15 aa, Homo sapiens
  CDR3 for beta chain variable domain of TCR clone 394076 (TRBV7-2, TRBJ2-1)
CASSLASGRVNEQFF

SEQ ID NO: 788153 - protein, 16 aa, Homo sapiens
  CDR3 for alpha chain variable domain of TCR clone 394077 (TRAV30, TRAJ24)
CGTEVVDADSWGKFQV

SEQ ID NO: 788154 - protein, 14 aa, Homo sapiens
  CDR3 for beta chain variable domain of TCR clone 394077 (TRBV12-5, TRBJ2-5)
CASGSRTHQETQYF

SEQ ID NO: 788155 - protein, 15 aa, Homo sapiens
  CDR3 for alpha chain variable domain of TCR clone 394078 (TRAV8-3, TRAJ11)
CAVGLLDSGYSTLTF

SEQ ID NO: 788156 - protein, 17 aa, Homo sapiens
  CDR3 for beta chain variable domain of TCR clone 394078 (TRBV4-1, TRBJ1-4)
CASSQEVPRGVEEKLFF

SEQ ID NO: 788157 - protein, 15 aa, Homo sapiens
  CDR3 for alpha chain variable domain of TCR clone 394079 (TRAV12-1, TRAJ40)
CVVNMHFPGTYKYIF

SEQ ID NO: 788158 - protein, 15 aa, Homo sapiens
  CDR3 for beta chain variable domain of TCR clone 394079 (TRBV20-1, TRBJ1-6)
CSARAASSYNSPLHF

SEQ ID NO: 788159 - protein, 16 aa, Homo sapiens
  CDR3 for alpha chain variable domain of TCR clone 394080 (TRAV30, TRAJ24)
CGTEIVDADSWGKFQF

SEQ ID NO: 788160 - protein, 15 aa, Homo sapiens
  CDR3 for beta chain variable domain of TCR clone 394080 (TRBV20-1, TRBJ2-7)
CSARDRVAGMDEQYS

SEQ ID NO: 788161 - protein, 14 aa, Homo sapiens
  CDR3 for alpha chain variable domain of TCR clone 394081 (TRAV12-2, TRAJ44)
CAVNPAGTASKLTF

SEQ ID NO: 788162 - protein, 14 aa, Homo sapiens
  CDR3 for beta chain variable domain of TCR clone 394081 (TRBV6-1, TRBJ1-3)
CASVQGGGGNTMYF

SEQ ID NO: 788163 - protein, 16 aa, Homo sapiens
  CDR3 for alpha chain variable domain of TCR clone 394082 (TRAV12-2, TRAJ52)
CAVNNRGGTSYGKLKF

SEQ ID NO: 788164 - protein, 16 aa, Homo sapiens
  CDR3 for beta chain variable domain of TCR clone 394082 (TRBV5-1, TRBJ2-2)
CASSFGDRPNTGELFF

SEQ ID NO: 788165 - protein, 13 aa, Homo sapiens
  CDR3 for alpha chain variable domain of TCR clone 394083 (TRAV21, TRAJ27)
CAARPGNAGKSTF

SEQ ID NO: 788166 - protein, 20 aa, Homo sapiens
  CDR3 for beta chain variable domain of TCR clone 394083 (TRBV11-2, TRBJ2-2)
LRTRPCISVPAALEAGSCFF

SEQ ID NO: 788167 - protein, 13 aa, Homo sapiens
  CDR3 for alpha chain variable domain of TCR clone 394084 (TRAV2, TRAJ40)
CAVVTSGTYKYIF

SEQ ID NO: 788168 - protein, 14 aa, Homo sapiens
  CDR3 for beta chain variable domain of TCR clone 394084 (TRBV19, TRBJ2-1)
CASLTFVLSGELFF

SEQ ID NO: 788169 - protein, 13 aa, Homo sapiens
  CDR3 for alpha chain variable domain of TCR clone 394085 (TRAV27, TRAJ49)
CAPRPYTGNQFYF

SEQ ID NO: 788170 - protein, 15 aa, Homo sapiens
  CDR3 for beta chain variable domain of TCR clone 394085 (TRBV6-3, TRBJ2-7)
CASSSPGAVFYEQYF

SEQ ID NO: 788171 - protein, 15 aa, Homo sapiens
  CDR3 for alpha chain variable domain of TCR clone 394086 (TRAV3, TRAJ5)
CAVRDRKTGRIALTF

SEQ ID NO: 788172 - protein, 15 aa, Homo sapiens
  CDR3 for beta chain variable domain of TCR clone 394086 (TRBV7-8, TRBJ2-1)
RASSLADSLYNEQFF

SEQ ID NO: 788173 - protein, 15 aa, Homo sapiens
  CDR3 for alpha chain variable domain of TCR clone 394087 (TRAV2, TRAJ9)
CAVEDRGTVGFKTIF

SEQ ID NO: 788174 - protein, 16 aa, Homo sapiens
  CDR3 for beta chain variable domain of TCR clone 394087 (TRBV24-1, TRBJ2-3)
CATSDRGTGATDTQYF

SEQ ID NO: 788175 - protein, 14 aa, Homo sapiens
  CDR3 for alpha chain variable domain of TCR clone 394088 (TRAV12-3, TRAJ13)
CAMKNSGGYQKGTF

SEQ ID NO: 788176 - protein, 13 aa, Homo sapiens
  CDR3 for beta chain variable domain of TCR clone 394088 (TRBV29-1, TRBJ2-5)
CSARDRVEETQYF

SEQ ID NO: 788177 - protein, 11 aa, Homo sapiens
  CDR3 for alpha chain variable domain of TCR clone 394089 (TRAV1-2, TRAJ20)
CAVANDYKLSF

SEQ ID NO: 788178 - protein, 15 aa, Homo sapiens
  CDR3 for beta chain variable domain of TCR clone 394089 (TRBV4-1, TRBJ2-7)
CASSQNTGRLYEQYF

SEQ ID NO: 788179 - protein, 15 aa, Homo sapiens
  CDR3 for alpha chain variable domain of TCR clone 394090 (TRAV2, TRAJ39)
CAVEDRRNAGNMLTF

SEQ ID NO: 788180 - protein, 16 aa, Homo sapiens
  CDR3 for beta chain variable domain of TCR clone 394090 (TRBV7-8, TRBJ2-7)
CASSLAYGTSVYEQYF

SEQ ID NO: 788181 - protein, 18 aa, Homo sapiens
  CDR3 for alpha chain variable domain of TCR clone 394091 (TRAV21, TRAJ52)
FAVRPSPAGGTSYGKLTF

SEQ ID NO: 788182 - protein, 16 aa, Homo sapiens
  CDR3 for beta chain variable domain of TCR clone 394091 (TRBV13, TRBJ2-3)
CQQPLQGSGGRNTQYF

SEQ ID NO: 788183 - protein, 23 aa, Homo sapiens
  CDR3 for alpha chain variable domain of TCR clone 394092 (TRAV12-1, TRAJ26)
CVVNSWVTRVRILSLVPEPDCPV

SEQ ID NO: 788184 - protein, 13 aa, Homo sapiens
  CDR3 for beta chain variable domain of TCR clone 394092 (TRBV10-3, TRBJ2-7)
CASKLAVNYEQYF

SEQ ID NO: 788185 - protein, 14 aa, Homo sapiens
  CDR3 for alpha chain variable domain of TCR clone 394093 (TRAV9-2, TRAJ39)
CALYSYNAGNMLTF

SEQ ID NO: 788186 - protein, 14 aa, Homo sapiens
  CDR3 for beta chain variable domain of TCR clone 394093 (TRBV4-1, TRBJ2-2)
CASSQAVDTGELFF

SEQ ID NO: 788187 - protein, 13 aa, Homo sapiens
  CDR3 for alpha chain variable domain of TCR clone 394094 (TRAV12-2, TRAJ40)
CAVKRTGTYKYIF

SEQ ID NO: 788188 - protein, 15 aa, Homo sapiens
  CDR3 for beta chain variable domain of TCR clone 394094 (TRBV28, TRBJ2-4)
CASSIQGARGDIQYF

SEQ ID NO: 788189 - protein, 15 aa, Homo sapiens
  CDR3 for alpha chain variable domain of TCR clone 394095 (TRAV17, TRAJ56)
CATDANTGANSKMTF

SEQ ID NO: 788190 - protein, 16 aa, Homo sapiens
  CDR3 for beta chain variable domain of TCR clone 394095 (TRBV7-3, TRBJ2-2)
CASSLKRGTLSGELFF

SEQ ID NO: 788191 - protein, 14 aa, Homo sapiens
  CDR3 for alpha chain variable domain of TCR clone 394096 (TRAV17, TRAJ32)
CATDPGGAANKLLF

SEQ ID NO: 788192 - protein, 14 aa, Homo sapiens
  CDR3 for beta chain variable domain of TCR clone 394096 (TRBV2, TRBJ1-5)
CASSENRGGQPQHF

SEQ ID NO: 788193 - protein, 13 aa, Homo sapiens
  CDR3 for alpha chain variable domain of TCR clone 394097 (TRAV20, TRAJ17)
CAVLRDAGNKLTF

SEQ ID NO: 788194 - protein, 12 aa, Homo sapiens
  CDR3 for beta chain variable domain of TCR clone 394097 (TRBV5-7, TRBJ2-7)
CASSLGRYEQYV

SEQ ID NO: 788195 - protein, 15 aa, Homo sapiens
  CDR3 for alpha chain variable domain of TCR clone 394098 (TRAV16, TRAJ22)
CSRGRLSHVPPQLTF

SEQ ID NO: 788196 - protein, 15 aa, Homo sapiens
  CDR3 for beta chain variable domain of TCR clone 394098 (TRBV7-9, TRBJ1-6)
CASSSPGRGNSPLHF

SEQ ID NO: 788197 - protein, 13 aa, Homo sapiens
  CDR3 for alpha chain variable domain of TCR clone 394099 (TRAV1-2, TRAJ9)
CAALNTGCFKTIF

SEQ ID NO: 788198 - protein, 16 aa, Homo sapiens
  CDR3 for beta chain variable domain of TCR clone 394099 (TRBV11-2, TRBJ2-1)
CASSPRLAGVYNEQFF

SEQ ID NO: 788199 - protein, 11 aa, Homo sapiens
  CDR3 for alpha chain variable domain of TCR clone 394100 (TRAV12-1, TRAJ37)
CVVNTPGKLIF

SEQ ID NO: 788200 - protein, 13 aa, Homo sapiens
  CDR3 for beta chain variable domain of TCR clone 394100 (TRBV12-4, TRBJ1-5)
CASRPDRAQPQHF

SEQ ID NO: 788201 - protein, 16 aa, Homo sapiens
  CDR3 for alpha chain variable domain of TCR clone 394101 (TRAV8-3, TRAJ8)
FAVPRDGNTGFQKLVF

SEQ ID NO: 788202 - protein, 14 aa, Homo sapiens
  CDR3 for beta chain variable domain of TCR clone 394101 (TRBV28, TRBJ1-1)
CASSESGRGTEAFF

SEQ ID NO: 788203 - protein, 14 aa, Homo sapiens
  CDR3 for alpha chain variable domain of TCR clone 394102 (TRAV1-2, TRAJ16)
CAVNRFSDGQKLLV

SEQ ID NO: 788204 - protein, 14 aa, Homo sapiens
  CDR3 for beta chain variable domain of TCR clone 394102 (TRBV7-3, TRBJ1-1)
CASSLKGGNTEAFF

SEQ ID NO: 788205 - protein, 14 aa, Homo sapiens
  CDR3 for alpha chain variable domain of TCR clone 394103 (TRAV9-2, TRAJ39)
CALYIYNAGNMLTF

SEQ ID NO: 788206 - protein, 15 aa, Homo sapiens
  CDR3 for beta chain variable domain of TCR clone 394103 (TRBV20-1, TRBJ2-7)
CSAEYGTSGAYEQYF

SEQ ID NO: 788207 - protein, 12 aa, Homo sapiens
  CDR3 for alpha chain variable domain of TCR clone 394104 (TRAV12-3, TRAJ41)
WAMSYSGYALNF

SEQ ID NO: 788208 - protein, 13 aa, Homo sapiens
  CDR3 for beta chain variable domain of TCR clone 394104 (TRBV7-3, TRBJ2-1)
CASSLDSYNEQFF

SEQ ID NO: 788209 - protein, 15 aa, Homo sapiens
  CDR3 for alpha chain variable domain of TCR clone 394105 (TRAV3, TRAJ22)
CAVRDRGGSARQLTF

SEQ ID NO: 788210 - protein, 13 aa, Homo sapiens
  CDR3 for beta chain variable domain of TCR clone 394105 (TRBV7-3, TRBJ2-1)
CASSHVAYNEQFF

SEQ ID NO: 788211 - protein, 14 aa, Homo sapiens
  CDR3 for alpha chain variable domain of TCR clone 394106 (TRAV1-2, TRAJ16)
CAVNRFSDGQTLLF

SEQ ID NO: 788212 - protein, 14 aa, Homo sapiens
  CDR3 for beta chain variable domain of TCR clone 394106 (TRBV7-2, TRBJ1-1)
CASSFLTGTTEAFF

SEQ ID NO: 788213 - protein, 13 aa, Homo sapiens
  CDR3 for alpha chain variable domain of TCR clone 394107 (TRAV3, TRAJ27)
CAVRPLGAGKSTF

SEQ ID NO: 788214 - protein, 16 aa, Homo sapiens
  CDR3 for beta chain variable domain of TCR clone 394107 (TRBV4-3, TRBJ2-2)
CASSHLQGSGTGELFF

SEQ ID NO: 788215 - protein, 15 aa, Homo sapiens
  CDR3 for alpha chain variable domain of TCR clone 394108 (TRAV26-2, TRAJ39)
CSLRGNNNAGNRPTF

SEQ ID NO: 788216 - protein, 15 aa, Homo sapiens
  CDR3 for beta chain variable domain of TCR clone 394108 (TRBV5-4, TRBJ1-1)
CASSSLGWANTEAFF

SEQ ID NO: 788217 - protein, 15 aa, Homo sapiens
  CDR3 for alpha chain variable domain of TCR clone 394109 (TRAV23/DV6, TRAJ44)
CAASGGTGTASKLTF

SEQ ID NO: 788218 - protein, 16 aa, Homo sapiens
  CDR3 for beta chain variable domain of TCR clone 394109 (TRBV20-1, TRBJ2-3)
CSALAFDTGDPDTHYF

SEQ ID NO: 788219 - protein, 16 aa, Homo sapiens
  CDR3 for alpha chain variable domain of TCR clone 394110 (TRAV3, TRAJ18)
CAVRDGRGSTLGRLYF

SEQ ID NO: 788220 - protein, 15 aa, Homo sapiens
  CDR3 for beta chain variable domain of TCR clone 394110 (TRBV18, TRBJ2-1)
CASSPPSASYNEQFF

SEQ ID NO: 788221 - protein, 14 aa, Homo sapiens
  CDR3 for alpha chain variable domain of TCR clone 394111 (TRAV23/DV6, TRAJ11)
CAESLESGYSTLTF

SEQ ID NO: 788222 - protein, 13 aa, Homo sapiens
  CDR3 for beta chain variable domain of TCR clone 394111 (TRBV4-1, TRBJ2-5)
CASSLTRGETQYF

SEQ ID NO: 788223 - protein, 12 aa, Homo sapiens
  CDR3 for alpha chain variable domain of TCR clone 394112 (TRAV21, TRAJ33)
CTKMDSNNKLIW

SEQ ID NO: 788224 - protein, 14 aa, Homo sapiens
  CDR3 for beta chain variable domain of TCR clone 394112 (TRBV2, TRBJ2-7)
CASSLTSGGYEQYF

SEQ ID NO: 788225 - protein, 12 aa, Homo sapiens
  CDR3 for alpha chain variable domain of TCR clone 394113 (TRAV12-3, TRAJ17)
CAMTLTGNKPTF

SEQ ID NO: 788226 - protein, 15 aa, Homo sapiens
  CDR3 for beta chain variable domain of TCR clone 394113 (TRBV20-1, TRBJ2-7)
CSARGRVSGMDEQYF

SEQ ID NO: 788227 - protein, 14 aa, Homo sapiens
  CDR3 for alpha chain variable domain of TCR clone 394114 (TRAV38-1, TRAJ45)
CASHSGGGADGLTF

SEQ ID NO: 788228 - protein, 13 aa, Homo sapiens
  CDR3 for beta chain variable domain of TCR clone 394114 (TRBV11-2, TRBJ2-5)
CASSSTGEETQYF

SEQ ID NO: 788229 - protein, 12 aa, Homo sapiens
  CDR3 for alpha chain variable domain of TCR clone 394115 (TRAV21, TRAJ39)
CAADNAGNMLTF

SEQ ID NO: 788230 - protein, 19 aa, Homo sapiens
  CDR3 for beta chain variable domain of TCR clone 394115 (TRBV25-1, TRBJ2-2)
CAILVYRVDRGRKTGELFF

SEQ ID NO: 788231 - protein, 13 aa, Homo sapiens
  CDR3 for alpha chain variable domain of TCR clone 394116 (TRAV8-3, TRAJ43)
CAVGPDNNNDMSF

SEQ ID NO: 788232 - protein, 12 aa, Homo sapiens
  CDR3 for beta chain variable domain of TCR clone 394116 (TRBV7-2, TRBJ1-6)
CASSLASSPLHF

SEQ ID NO: 788233 - protein, 13 aa, Homo sapiens
  CDR3 for alpha chain variable domain of TCR clone 394117 (TRAV22, TRAJ29)
CAVGGSGNTPLVF

SEQ ID NO: 788234 - protein, 17 aa, Homo sapiens
  CDR3 for beta chain variable domain of TCR clone 394117 (TRBV24-1, TRBJ2-4)
CATSDAEARGVRNIQYF

SEQ ID NO: 788235 - protein, 13 aa, Homo sapiens
  CDR3 for alpha chain variable domain of TCR clone 394118 (TRAV8-3, TRAJ43)
CAVVPYNNNVMRF

SEQ ID NO: 788236 - protein, 16 aa, Homo sapiens
  CDR3 for beta chain variable domain of TCR clone 394118 (TRBV7-2, TRBJ2-5)
CASSPFPTGGEETQYF

SEQ ID NO: 788237 - protein, 13 aa, Homo sapiens
  CDR3 for alpha chain variable domain of TCR clone 394119 (TRAV23/DV6, TRAJ9)
CAASTTGGSTTIF

SEQ ID NO: 788238 - protein, 18 aa, Homo sapiens
  CDR3 for beta chain variable domain of TCR clone 394119 (TRBV11-2, TRBJ2-3)
CASSLGGASRGAPNTQYF

SEQ ID NO: 788239 - protein, 14 aa, Homo sapiens
  CDR3 for alpha chain variable domain of TCR clone 394120 (TRAV16, TRAJ39)
CALSKNNAGNVLTF

SEQ ID NO: 788240 - protein, 17 aa, Homo sapiens
  CDR3 for beta chain variable domain of TCR clone 394120 (TRBV23-1, TRBJ1-2)
CASSNTGGGLLWLHLRF

SEQ ID NO: 788241 - protein, 15 aa, Homo sapiens
  CDR3 for alpha chain variable domain of TCR clone 394121 (TRAV13-1, TRAJ10)
CAASPRTGGGNKLTF

SEQ ID NO: 788242 - protein, 15 aa, Homo sapiens
  CDR3 for beta chain variable domain of TCR clone 394121 (TRBV19, TRBJ1-2)
CASSVGQVLNYGYTF

SEQ ID NO: 788243 - protein, 15 aa, Homo sapiens
  CDR3 for alpha chain variable domain of TCR clone 394122 (TRAV20, TRAJ53)
CAVQTSGGSNYKLTF

SEQ ID NO: 788244 - protein, 12 aa, Homo sapiens
  CDR3 for beta chain variable domain of TCR clone 394122 (TRBV7-6, TRBJ2-5)
CASSLSQETQYF

SEQ ID NO: 788245 - protein, 15 aa, Homo sapiens
  CDR3 for alpha chain variable domain of TCR clone 394123 (TRAV25, TRAJ41)
CAGPWNSNSGYALNF

SEQ ID NO: 788246 - protein, 20 aa, Homo sapiens
  CDR3 for beta chain variable domain of TCR clone 394123 (TRBV7-8, TRBJ2-2)
CASSHLFPGPTIHITGELFF

SEQ ID NO: 788247 - protein, 12 aa, Homo sapiens
  CDR3 for alpha chain variable domain of TCR clone 394124 (TRAV13-1, TRAJ26)
QAQDNYGQNFVF

SEQ ID NO: 788248 - protein, 13 aa, Homo sapiens
  CDR3 for beta chain variable domain of TCR clone 394124 (TRBV7-9, TRBJ2-7)
CASSAGLQYEQYF

SEQ ID NO: 788249 - protein, 17 aa, Homo sapiens
  CDR3 for alpha chain variable domain of TCR clone 394125 (TRAV3, TRAJ6)
CAVRDGPRAGGSYIPTF

SEQ ID NO: 788250 - protein, 17 aa, Homo sapiens
  CDR3 for beta chain variable domain of TCR clone 394125 (TRBV24-1, TRBJ2-4)
CATSDAEARGVRNIQYF

SEQ ID NO: 788251 - protein, 13 aa, Homo sapiens
  CDR3 for alpha chain variable domain of TCR clone 394126 (TRAV3, TRAJ3)
CAVRALGASKIIF

SEQ ID NO: 788252 - protein, 17 aa, Homo sapiens
  CDR3 for beta chain variable domain of TCR clone 394126 (TRBV5-4, TRBJ1-1)
CASFPPKGRLQNTEAFF

SEQ ID NO: 788253 - protein, 18 aa, Homo sapiens
  CDR3 for alpha chain variable domain of TCR clone 394127 (TRAV21, TRAJ52)
CAVRPSPAGGTSCGKLTF

SEQ ID NO: 788254 - protein, 15 aa, Homo sapiens
  CDR3 for beta chain variable domain of TCR clone 394127 (TRBV4-1, TRBJ2-3)
CASSRGQGIPDTQYF

SEQ ID NO: 788255 - protein, 14 aa, Homo sapiens
  CDR3 for alpha chain variable domain of TCR clone 394128 (TRAV12-2, TRAJ13)
CAVKKTGGYQKVTF

SEQ ID NO: 788256 - protein, 12 aa, Homo sapiens
  CDR3 for beta chain variable domain of TCR clone 394128 (TRBV7-9, TRBJ2-7)
CASSLEGYEQFF

SEQ ID NO: 788257 - protein, 13 aa, Homo sapiens
  CDR3 for alpha chain variable domain of TCR clone 394129 (TRAV12-3, TRAJ21)
CAPGPHTFNKFYF

SEQ ID NO: 788258 - protein, 13 aa, Homo sapiens
  CDR3 for beta chain variable domain of TCR clone 394129 (TRBV4-2, TRBJ1-1)
CASSQAGNTEAFF

SEQ ID NO: 788259 - protein, 15 aa, Homo sapiens
  CDR3 for alpha chain variable domain of TCR clone 394130 (TRAV20, TRAJ41)
CAVQANSNSGYALNF

SEQ ID NO: 788260 - protein, 18 aa, Homo sapiens
  CDR3 for beta chain variable domain of TCR clone 394130 (TRBV7-9, TRBJ2-7)
CASSLTTSGSRAWYEQYF

SEQ ID NO: 788261 - protein, 11 aa, Homo sapiens
  CDR3 for alpha chain variable domain of TCR clone 394131 (TRAV16, TRAJ49)
CSLNTGNQFSF

SEQ ID NO: 788262 - protein, 12 aa, Homo sapiens
  CDR3 for beta chain variable domain of TCR clone 394131 (TRBV7-9, TRBJ1-4)
CASSTDREKLFF

SEQ ID NO: 788263 - protein, 12 aa, Homo sapiens
  CDR3 for alpha chain variable domain of TCR clone 394132 (TRAV2, TRAJ24)
CAATDSWGKFQF

SEQ ID NO: 788264 - protein, 17 aa, Homo sapiens
  CDR3 for beta chain variable domain of TCR clone 394132 (TRBV3-1, TRBJ2-2)
CASSQFRDKVDTGELFF

SEQ ID NO: 788265 - protein, 14 aa, Homo sapiens
  CDR3 for alpha chain variable domain of TCR clone 394133 (TRAV1-2, TRAJ8)
CAVREDTGFQKLVF

SEQ ID NO: 788266 - protein, 13 aa, Homo sapiens
  CDR3 for beta chain variable domain of TCR clone 394133 (TRBV19, TRBJ1-3)
CASRLSLGNTIYF

SEQ ID NO: 788267 - protein, 16 aa, Homo sapiens
  CDR3 for alpha chain variable domain of TCR clone 394134 (TRAV8-3, TRAJ42)
CAGGEGNGGSQGNLIF

SEQ ID NO: 788268 - protein, 14 aa, Homo sapiens
  CDR3 for beta chain variable domain of TCR clone 394134 (TRBV7-2, TRBJ2-1)
CASSRGGARNEQFF

SEQ ID NO: 788269 - protein, 11 aa, Homo sapiens
  CDR3 for alpha chain variable domain of TCR clone 394135 (TRAV12-3, TRAJ27)
CAMANAGTSTL

SEQ ID NO: 788270 - protein, 13 aa, Homo sapiens
  CDR3 for beta chain variable domain of TCR clone 394135 (TRBV20-1, TRBJ1-1)
CSARVGGNTEAFF

SEQ ID NO: 788271 - protein, 14 aa, Homo sapiens
  CDR3 for alpha chain variable domain of TCR clone 394136 (TRAV38-1, TRAJ40)
CALRPTSGTYKYIF

SEQ ID NO: 788272 - protein, 13 aa, Homo sapiens
  CDR3 for beta chain variable domain of TCR clone 394136 (TRBV19, TRBJ1-1)
CASSIGPQAEAFF

SEQ ID NO: 788273 - protein, 14 aa, Homo sapiens
  CDR3 for alpha chain variable domain of TCR clone 394137 (TRAV23/DV6, TRAJ11)
CAALIGGGYSTLTF

SEQ ID NO: 788274 - protein, 15 aa, Homo sapiens
  CDR3 for beta chain variable domain of TCR clone 394137 (TRBV18, TRBJ2-7)
CASSPSSTGNYEQYF

SEQ ID NO: 788275 - protein, 15 aa, Homo sapiens
  CDR3 for alpha chain variable domain of TCR clone 394138 (TRAV21, TRAJ53)
CATLNSGGSNYKLTF

SEQ ID NO: 788276 - protein, 14 aa, Homo sapiens
  CDR3 for beta chain variable domain of TCR clone 394138 (TRBV19, TRBJ2-1)
CASPTVVLSGEQFF

SEQ ID NO: 788277 - protein, 18 aa, Homo sapiens
  CDR3 for alpha chain variable domain of TCR clone 394139 (TRAV38-2/DV8, TRAJ52)
CAYRSVGAGGTSYGKLTF

SEQ ID NO: 788278 - protein, 12 aa, Homo sapiens
  CDR3 for beta chain variable domain of TCR clone 394139 (TRBV14, TRBJ2-5)
CASSQLKETQYF

SEQ ID NO: 788279 - protein, 16 aa, Homo sapiens
  CDR3 for alpha chain variable domain of TCR clone 394140 (TRAV3, TRAJ37)
CAVRPHGSGNTGKLIF

SEQ ID NO: 788280 - protein, 14 aa, Homo sapiens
  CDR3 for beta chain variable domain of TCR clone 394140 (TRBV20-1, TRBJ2-1)
CSAQIGGSANEQFF

SEQ ID NO: 788281 - protein, 17 aa, Homo sapiens
  CDR3 for alpha chain variable domain of TCR clone 394141 (TRAV4, TRAJ18)
CLVVAAGRGSTLGRLYF

SEQ ID NO: 788282 - protein, 17 aa, Homo sapiens
  CDR3 for beta chain variable domain of TCR clone 394141 (TRBV28, TRBJ2-2)
CASSLATGMGDAGELLF

SEQ ID NO: 788283 - protein, 14 aa, Homo sapiens
  CDR3 for alpha chain variable domain of TCR clone 394142 (TRAV14/DV4, TRAJ8)
CPRGSLRSQGNLIF

SEQ ID NO: 788284 - protein, 12 aa, Homo sapiens
  CDR3 for beta chain variable domain of TCR clone 394142 (TRBV27, TRBJ2-2)
CASKLFTGELFF

SEQ ID NO: 788285 - protein, 13 aa, Homo sapiens
  CDR3 for alpha chain variable domain of TCR clone 394143 (TRAV26-1, TRAJ48)
CIVLRVRNEKLTF

SEQ ID NO: 788286 - protein, 14 aa, Homo sapiens
  CDR3 for beta chain variable domain of TCR clone 394143 (TRBV20-1, TRBJ1-5)
CSARDISMNQPQHF

SEQ ID NO: 788287 - protein, 10 aa, Homo sapiens
  CDR3 for alpha chain variable domain of TCR clone 394144 (TRAV23/DV6, TRAJ57)
CAASSTLSQG

SEQ ID NO: 788288 - protein, 14 aa, Homo sapiens
  CDR3 for beta chain variable domain of TCR clone 394144 (TRBV25-1, TRBJ1-1)
CASTHLGGTTEAFF

SEQ ID NO: 788289 - protein, 12 aa, Homo sapiens
  CDR3 for alpha chain variable domain of TCR clone 394145 (TRAV8-6, TRAJ33)
WAVTDSNYQLIW

SEQ ID NO: 788290 - protein, 15 aa, Homo sapiens
  CDR3 for beta chain variable domain of TCR clone 394145 (TRBV4-3, TRBJ1-2)
CASSRGQGRNYGDTF

SEQ ID NO: 788291 - protein, 14 aa, Homo sapiens
  CDR3 for alpha chain variable domain of TCR clone 394146 (TRAV12-3, TRAJ47)
CAMSMREYGNKLVF

SEQ ID NO: 788292 - protein, 15 aa, Homo sapiens
  CDR3 for beta chain variable domain of TCR clone 394146 (TRBV20-1, TRBJ2-2)
CSARDTRLNTGELFF

SEQ ID NO: 788293 - protein, 13 aa, Homo sapiens
  CDR3 for alpha chain variable domain of TCR clone 394147 (TRAV2, TRAJ21)
CAVEDNNFNKFYF

SEQ ID NO: 788294 - protein, 16 aa, Homo sapiens
  CDR3 for beta chain variable domain of TCR clone 394147 (TRBV12-4, TRBJ1-5)
CASSRPVGGSNQPQHF

SEQ ID NO: 788295 - protein, 17 aa, Homo sapiens
  CDR3 for alpha chain variable domain of TCR clone 394148 (TRAV3, TRAJ42)
CAVRDRDYGGSQGNLIF

SEQ ID NO: 788296 - protein, 12 aa, Homo sapiens
  CDR3 for beta chain variable domain of TCR clone 394148 (TRBV7-9, TRBJ2-7)
CASRTGFDEQYF

SEQ ID NO: 788297 - protein, 17 aa, Homo sapiens
  CDR3 for alpha chain variable domain of TCR clone 394149 (TRAV23/DV6, TRAJ57)
CAASSTLSQAGSEKLVF

SEQ ID NO: 788298 - protein, 14 aa, Homo sapiens
  CDR3 for beta chain variable domain of TCR clone 394149 (TRBV20-1, TRBJ2-7)
CSAKRGRSSYEQYF

SEQ ID NO: 788299 - protein, 15 aa, Homo sapiens
  CDR3 for alpha chain variable domain of TCR clone 394150 (TRAV21, TRAJ53)
CATLSSGGSNYKLTF

SEQ ID NO: 788300 - protein, 16 aa, Homo sapiens
  CDR3 for beta chain variable domain of TCR clone 394150 (TRBV12-4, TRBJ1-5)
CASSRPVGGSNQPQHF

SEQ ID NO: 788301 - protein, 12 aa, Homo sapiens
  CDR3 for alpha chain variable domain of TCR clone 394151 (TRAV1-1, TRAJ30)
CAVRGRDDKIIL

SEQ ID NO: 788302 - protein, 13 aa, Homo sapiens
  CDR3 for beta chain variable domain of TCR clone 394151 (TRBV11-3, TRBJ2-7)
CASSLDKLYEQYF

SEQ ID NO: 788303 - protein, 11 aa, Homo sapiens
  CDR3 for alpha chain variable domain of TCR clone 394152 (TRAV13-2, TRAJ23)
CAESPRGKLIF

SEQ ID NO: 788304 - protein, 12 aa, Homo sapiens
  CDR3 for beta chain variable domain of TCR clone 394152 (TRBV11-2, TRBJ2-4)
CASSSASGSEYF

SEQ ID NO: 788305 - protein, 13 aa, Homo sapiens
  CDR3 for alpha chain variable domain of TCR clone 394153 (TRAV3, TRAJ27)
CAVRPLGTGKSTF

SEQ ID NO: 788306 - protein, 12 aa, Homo sapiens
  CDR3 for beta chain variable domain of TCR clone 394153 (TRBV7-9, TRBJ2-7)
CATRTDAYEQYF

SEQ ID NO: 788307 - protein, 10 aa, Homo sapiens
  CDR3 for alpha chain variable domain of TCR clone 394154 (TRAV16, TRAJ22)
SAMYLRQLTF

SEQ ID NO: 788308 - protein, 15 aa, Homo sapiens
  CDR3 for beta chain variable domain of TCR clone 394154 (TRBV2, TRBJ2-1)
CASSELAGSYNEQFF

SEQ ID NO: 788309 - protein, 14 aa, Homo sapiens
  CDR3 for alpha chain variable domain of TCR clone 394155 (TRAV20, TRAJ42)
CAVQAGGSQGNRIF

SEQ ID NO: 788310 - protein, 14 aa, Homo sapiens
  CDR3 for beta chain variable domain of TCR clone 394155 (TRBV28, TRBJ1-2)
CASRIPGANYGYTF

SEQ ID NO: 788311 - protein, 14 aa, Homo sapiens
  CDR3 for alpha chain variable domain of TCR clone 394156 (TRAV12-2, TRAJ13)
CAVKKTGGYQKVTF

SEQ ID NO: 788312 - protein, 16 aa, Homo sapiens
  CDR3 for beta chain variable domain of TCR clone 394156 (TRBV4-2, TRBJ2-7)
CASSQDRGTSSYEQYF

SEQ ID NO: 788313 - protein, 15 aa, Homo sapiens
  CDR3 for alpha chain variable domain of TCR clone 394157 (TRAV21, TRAJ53)
CATLNSGGSNYKLTF

SEQ ID NO: 788314 - protein, 13 aa, Homo sapiens
  CDR3 for beta chain variable domain of TCR clone 394157 (TRBV28, TRBJ2-7)
CASSPSGTYEQYF

SEQ ID NO: 788315 - protein, 13 aa, Homo sapiens
  CDR3 for alpha chain variable domain of TCR clone 394158 (TRAV21, TRAJ26)
CAVIGNYGQNFVF

SEQ ID NO: 788316 - protein, 15 aa, Homo sapiens
  CDR3 for beta chain variable domain of TCR clone 394158 (TRBV5-1, TRBJ2-7)
CASSLSGGPAGEQYF

SEQ ID NO: 788317 - protein, 12 aa, Homo sapiens
  CDR3 for alpha chain variable domain of TCR clone 394159 (TRAV3, TRAJ20)
CAVRDGDYKLSF

SEQ ID NO: 788318 - protein, 13 aa, Homo sapiens
  CDR3 for beta chain variable domain of TCR clone 394159 (TRBV9, TRBJ2-1)
CARSVGQGGEQFF

SEQ ID NO: 788319 - protein, 18 aa, Homo sapiens
  CDR3 for alpha chain variable domain of TCR clone 394160 (TRAV21, TRAJ52)
CAVRPSPAGGTSCGKLTF

SEQ ID NO: 788320 - protein, 17 aa, Homo sapiens
  CDR3 for beta chain variable domain of TCR clone 394160 (TRBV13, TRBJ2-3)
CASSRSRVAGGRNTQYF

SEQ ID NO: 788321 - protein, 13 aa, Homo sapiens
  CDR3 for alpha chain variable domain of TCR clone 394161 (TRAV13-1, TRAJ13)
CAASKRGYQKVTF

SEQ ID NO: 788322 - protein, 16 aa, Homo sapiens
  CDR3 for beta chain variable domain of TCR clone 394161 (TRBV18, TRBJ1-2)
CASSPPERVTIDGYTF

SEQ ID NO: 788323 - protein, 14 aa, Homo sapiens
  CDR3 for alpha chain variable domain of TCR clone 394162 (TRAV26-1, TRAJ38)
CIADNAGNNRKLIW

SEQ ID NO: 788324 - protein, 18 aa, Homo sapiens
  CDR3 for beta chain variable domain of TCR clone 394162 (TRBV12-4, TRBJ2-4)
CASSRTGAVDVAKNIQYF

SEQ ID NO: 788325 - protein, 14 aa, Homo sapiens
  CDR3 for alpha chain variable domain of TCR clone 394163 (TRAV12-1, TRAJ24)
CVVRSTDSWGKFQF

SEQ ID NO: 788326 - protein, 20 aa, Homo sapiens
  CDR3 for beta chain variable domain of TCR clone 394163 (TRBV28, TRBJ2-1)
CASTPIGRSPGLAGGNEQFF

SEQ ID NO: 788327 - protein, 23 aa, Homo sapiens
  CDR3 for alpha chain variable domain of TCR clone 394164 (TRAV26-1, TRAJ38)
CIADNAGNNHIQNPDPAAYQLRD

SEQ ID NO: 788328 - protein, 13 aa, Homo sapiens
  CDR3 for beta chain variable domain of TCR clone 394164 (TRBV5-4, TRBJ1-1)
CASSVDLGTEAFF

SEQ ID NO: 788329 - protein, 16 aa, Homo sapiens
  CDR3 for alpha chain variable domain of TCR clone 394165 (TRAV30, TRAJ24)
CGTEIVDADSCGKFQF

SEQ ID NO: 788330 - protein, 14 aa, Homo sapiens
  CDR3 for beta chain variable domain of TCR clone 394165 (TRBV12-5, TRBJ2-5)
CASGSRTHQGTQYF

SEQ ID NO: 788331 - protein, 11 aa, Homo sapiens
  CDR3 for alpha chain variable domain of TCR clone 394166 (TRAV12-3, TRAJ16)
CAIRDGQKLLF

SEQ ID NO: 788332 - protein, 15 aa, Homo sapiens
  CDR3 for beta chain variable domain of TCR clone 394166 (TRBV20-1, TRBJ2-7)
CSARDRVSGMDEQYF

SEQ ID NO: 788333 - protein, 15 aa, Homo sapiens
  CDR3 for alpha chain variable domain of TCR clone 394167 (TRAV17, TRAJ3)
CATDGPHSSASKIIF

SEQ ID NO: 788334 - protein, 16 aa, Homo sapiens
  CDR3 for beta chain variable domain of TCR clone 394167 (TRBV19, TRBJ1-1)
CASRFGGPVTGTEAFF

SEQ ID NO: 788335 - protein, 13 aa, Homo sapiens
  CDR3 for alpha chain variable domain of TCR clone 394168 (TRAV1-2, TRAJ9)
CAVLNTGGFKTIF

SEQ ID NO: 788336 - protein, 13 aa, Homo sapiens
  CDR3 for beta chain variable domain of TCR clone 394168 (TRBV19, TRBJ2-7)
CASRKACGSEQYF

SEQ ID NO: 788337 - protein, 14 aa, Homo sapiens
  CDR3 for alpha chain variable domain of TCR clone 394169 (TRAV1-2, TRAJ16)
YAVNRFSDGQKLLF

SEQ ID NO: 788338 - protein, 12 aa, Homo sapiens
  CDR3 for beta chain variable domain of TCR clone 394169 (TRBV11-2, TRBJ2-2)
CASSLGGGELFF

SEQ ID NO: 788339 - protein, 12 aa, Homo sapiens
  CDR3 for alpha chain variable domain of TCR clone 394170 (TRAV21, TRAJ33)
CAKMDSNYQLIW

SEQ ID NO: 788340 - protein, 15 aa, Homo sapiens
  CDR3 for beta chain variable domain of TCR clone 394170 (TRBV9, TRBJ2-1)
CASGLAGSSYNEQFF

SEQ ID NO: 788341 - protein, 12 aa, Homo sapiens
  CDR3 for alpha chain variable domain of TCR clone 394171 (TRAV13-1, TRAJ21)
CAAKEGFNKFYF

SEQ ID NO: 788342 - protein, 16 aa, Homo sapiens
  CDR3 for beta chain variable domain of TCR clone 394171 (TRBV18, TRBJ1-1)
CASSPGLGGRGGEAFF

SEQ ID NO: 788343 - protein, 15 aa, Homo sapiens
  CDR3 for alpha chain variable domain of TCR clone 394172 (TRAV25, TRAJ48)
CAGPGANFGNEKLTF

SEQ ID NO: 788344 - protein, 18 aa, Homo sapiens
  CDR3 for beta chain variable domain of TCR clone 394172 (TRBV7-8, TRBJ2-1)
CASSPAEGLAGGLNEQFF

SEQ ID NO: 788345 - protein, 14 aa, Homo sapiens
  CDR3 for alpha chain variable domain of TCR clone 394173 (TRAV1-2, TRAJ16)
CAVNRFSDGQKLLF

SEQ ID NO: 788346 - protein, 14 aa, Homo sapiens
  CDR3 for beta chain variable domain of TCR clone 394173 (TRBV9, TRBJ1-6)
CQSVAGTGDSPLHF

SEQ ID NO: 788347 - protein, 13 aa, Homo sapiens
  CDR3 for alpha chain variable domain of TCR clone 394174 (TRAV1-1, TRAJ9)
CASKHTGGFKPIF

SEQ ID NO: 788348 - protein, 14 aa, Homo sapiens
  CDR3 for beta chain variable domain of TCR clone 394174 (TRBV12-5, TRBJ2-5)
CASGSRTHQETQYF

SEQ ID NO: 788349 - protein, 17 aa, Homo sapiens
  CDR3 for alpha chain variable domain of TCR clone 394175 (TRAV3, TRAJ6)
CAVRDGPGAGGSYIPTF

SEQ ID NO: 788350 - protein, 14 aa, Homo sapiens
  CDR3 for beta chain variable domain of TCR clone 394175 (TRBV7-2, TRBJ2-7)
SASSPKTSFYELYF

SEQ ID NO: 788351 - protein, 14 aa, Homo sapiens
  CDR3 for alpha chain variable domain of TCR clone 394176 (TRAV35, TRAJ22)
CAGLRPGSARQLTF

SEQ ID NO: 788352 - protein, 14 aa, Homo sapiens
  CDR3 for beta chain variable domain of TCR clone 394176 (TRBV11-3, TRBJ2-3)
CASSSGQGPVTQYF

SEQ ID NO: 788353 - protein, 15 aa, Homo sapiens
  CDR3 for alpha chain variable domain of TCR clone 394177 (TRAV8-6, TRAJ23)
CAVRLIYNQGGKLIF

SEQ ID NO: 788354 - protein, 14 aa, Homo sapiens
  CDR3 for beta chain variable domain of TCR clone 394177 (TRBV25-1, TRBJ1-1)
CASTHLGGNTEAFF

SEQ ID NO: 788355 - protein, 13 aa, Homo sapiens
  CDR3 for alpha chain variable domain of TCR clone 394178 (TRAV3, TRAJ27)
CAVRPLGAGKSTF

SEQ ID NO: 788356 - protein, 13 aa, Homo sapiens
  CDR3 for beta chain variable domain of TCR clone 394178 (TRBV7-9, TRBJ2-3)
CASSPGTTDTQYF

SEQ ID NO: 788357 - protein, 16 aa, Homo sapiens
  CDR3 for alpha chain variable domain of TCR clone 394179 (TRAV1-2, TRAJ10)
CAVRGVLTGGGNKLIF

SEQ ID NO: 788358 - protein, 20 aa, Homo sapiens
  CDR3 for beta chain variable domain of TCR clone 394179 (TRBV7-8, TRBJ2-2)
CASSHLFPGPTIHITGELFF

SEQ ID NO: 788359 - protein, 11 aa, Homo sapiens
  CDR3 for alpha chain variable domain of TCR clone 394180 (TRAV2, TRAJ33)
CAVESNYQLIW

SEQ ID NO: 788360 - protein, 16 aa, Homo sapiens
  CDR3 for beta chain variable domain of TCR clone 394180 (TRBV18, TRBJ1-1)
CASSPGVGGRGGEAFF

SEQ ID NO: 788361 - protein, 14 aa, Homo sapiens
  CDR3 for alpha chain variable domain of TCR clone 394181 (TRAV1-2, TRAJ16)
CAVNLFSDGQKLLF

SEQ ID NO: 788362 - protein, 19 aa, Homo sapiens
  CDR3 for beta chain variable domain of TCR clone 394181 (TRBV28, TRBJ2-7)
CASSYSGTSRLGWVYEQYF

SEQ ID NO: 788363 - protein, 14 aa, Homo sapiens
  CDR3 for alpha chain variable domain of TCR clone 394182 (TRAV12-2, TRAJ40)
CAVKIPSGTYKYIF

SEQ ID NO: 788364 - protein, 14 aa, Homo sapiens
  CDR3 for beta chain variable domain of TCR clone 394182 (TRBV7-2, TRBJ1-2)
CASSQTGSTYGDTF

SEQ ID NO: 788365 - protein, 14 aa, Homo sapiens
  CDR3 for alpha chain variable domain of TCR clone 394183 (TRAV26-1, TRAJ38)
CIADNAGNNRKLIW

SEQ ID NO: 788366 - protein, 17 aa, Homo sapiens
  CDR3 for beta chain variable domain of TCR clone 394183 (TRBV7-9, TRBJ2-3)
CASSPTVAEDLTDTQYF

SEQ ID NO: 788367 - protein, 15 aa, Homo sapiens
  CDR3 for alpha chain variable domain of TCR clone 394184 (TRAV21, TRAJ53)
CATLNSGGGNYKLTF

SEQ ID NO: 788368 - protein, 14 aa, Homo sapiens
  CDR3 for beta chain variable domain of TCR clone 394184 (TRBV9, TRBJ1-2)
CASSVSTRSYGYTF

SEQ ID NO: 788369 - protein, 13 aa, Homo sapiens
  CDR3 for alpha chain variable domain of TCR clone 394185 (TRAV3, TRAJ27)
CAVRPLAHANQPL

SEQ ID NO: 788370 - protein, 13 aa, Homo sapiens
  CDR3 for beta chain variable domain of TCR clone 394185 (TRBV7-9, TRBJ2-3)
CASSPGSTDTQYF

SEQ ID NO: 788371 - protein, 13 aa, Homo sapiens
  CDR3 for alpha chain variable domain of TCR clone 394186 (TRAV29/DV5, TRAJ49)
CAAPPNTGNQFYF

SEQ ID NO: 788372 - protein, 12 aa, Homo sapiens
  CDR3 for beta chain variable domain of TCR clone 394186 (TRBV19, TRBJ2-1)
CASSRQGAEQFF

SEQ ID NO: 788373 - protein, 15 aa, Homo sapiens
  CDR3 for alpha chain variable domain of TCR clone 394187 (TRAV17, TRAJ23)
CATDAEDNQGGKLSV

SEQ ID NO: 788374 - protein, 12 aa, Homo sapiens
  CDR3 for beta chain variable domain of TCR clone 394187 (TRBV2, TRBJ2-1)
CAKREGYNEQFF

SEQ ID NO: 788375 - protein, 14 aa, Homo sapiens
  CDR3 for alpha chain variable domain of TCR clone 394188 (TRAV3, TRAJ28)
CALRSGAGSYQLTF

SEQ ID NO: 788376 - protein, 15 aa, Homo sapiens
  CDR3 for beta chain variable domain of TCR clone 394188 (TRBV6-5, TRBJ2-1)
CASTLAQGAYNEQFF

SEQ ID NO: 788377 - protein, 20 aa, Homo sapiens
  CDR3 for alpha chain variable domain of TCR clone 394189 (TRAV1-1, TRAJ4)
CLLLLRCEGSLSGGYNKLIS

SEQ ID NO: 788378 - protein, 16 aa, Homo sapiens
  CDR3 for beta chain variable domain of TCR clone 394189 (TRBV28, TRBJ1-4)
CASSPPYRGRSEKLFF

SEQ ID NO: 788379 - protein, 13 aa, Homo sapiens
  CDR3 for alpha chain variable domain of TCR clone 394190 (TRAV21, TRAJ27)
CAALPGNAGKSTS

SEQ ID NO: 788380 - protein, 13 aa, Homo sapiens
  CDR3 for beta chain variable domain of TCR clone 394190 (TRBV18, TRBJ2-7)
CASQSGGGYEQYF

SEQ ID NO: 788381 - protein, 19 aa, Homo sapiens
  CDR3 for alpha chain variable domain of TCR clone 394191 (TRAV1-2, TRAJ26)
CLLPLCCERPDNYGQNFVF

SEQ ID NO: 788382 - protein, 14 aa, Homo sapiens
  CDR3 for beta chain variable domain of TCR clone 394191 (TRBV28, TRBJ2-1)
CASSLNGRNNEQFF

SEQ ID NO: 788383 - protein, 12 aa, Homo sapiens
  CDR3 for alpha chain variable domain of TCR clone 394192 (TRAV12-2, TRAJ3)
CAVYSSASKIIF

SEQ ID NO: 788384 - protein, 13 aa, Homo sapiens
  CDR3 for beta chain variable domain of TCR clone 394192 (TRBV12-4, TRBJ2-7)
CASSPTETYEQYF

SEQ ID NO: 788385 - protein, 14 aa, Homo sapiens
  CDR3 for alpha chain variable domain of TCR clone 394193 (TRAV12-3, TRAJ28)
CAMWSGAGSDQLTF

SEQ ID NO: 788386 - protein, 14 aa, Homo sapiens
  CDR3 for beta chain variable domain of TCR clone 394193 (TRBV19, TRBJ1-5)
CASSLSGGSQPQHF

SEQ ID NO: 788387 - protein, 12 aa, Homo sapiens
  CDR3 for alpha chain variable domain of TCR clone 394194 (TRAV8-3, TRAJ20)
CAVGANDYKLSF

SEQ ID NO: 788388 - protein, 15 aa, Homo sapiens
  CDR3 for beta chain variable domain of TCR clone 394194 (TRBV10-2, TRBJ2-6)
CASSEQGTGANVLTF

SEQ ID NO: 788389 - protein, 15 aa, Homo sapiens
  CDR3 for alpha chain variable domain of TCR clone 394195 (TRAV16, TRAJ12)
CSKWPLRDSSYKLIF

SEQ ID NO: 788390 - protein, 13 aa, Homo sapiens
  CDR3 for beta chain variable domain of TCR clone 394195 (TRBV4-2, TRBJ1-1)
CASSQAGNTDAFF

SEQ ID NO: 788391 - protein, 15 aa, Homo sapiens
  CDR3 for alpha chain variable domain of TCR clone 394196 (TRAV2, TRAJ11)
CAVGGRHSGYSTLTF

SEQ ID NO: 788392 - protein, 16 aa, Homo sapiens
  CDR3 for beta chain variable domain of TCR clone 394196 (TRBV29-1, TRBJ2-7)
CSVEVVGTSGSYEQYF

SEQ ID NO: 788393 - protein, 14 aa, Homo sapiens
  CDR3 for alpha chain variable domain of TCR clone 394197 (TRAV3, TRAJ16)
CCERLKSDGQKLLF

SEQ ID NO: 788394 - protein, 15 aa, Homo sapiens
  CDR3 for beta chain variable domain of TCR clone 394197 (TRBV28, TRBJ2-7)
CACSPGGRGFYEQYF

SEQ ID NO: 788395 - protein, 14 aa, Homo sapiens
  CDR3 for alpha chain variable domain of TCR clone 394198 (TRAV8-3, TRAJ35)
CAVVPQGFGNVLHC

SEQ ID NO: 788396 - protein, 15 aa, Homo sapiens
  CDR3 for beta chain variable domain of TCR clone 394198 (TRBV6-1, TRBJ2-2)
CTSSAGQGYTGELFF

SEQ ID NO: 788397 - protein, 12 aa, Homo sapiens
  CDR3 for alpha chain variable domain of TCR clone 394199 (TRAV21, TRAJ40)
CAVFPGTYKYIF

SEQ ID NO: 788398 - protein, 15 aa, Homo sapiens
  CDR3 for beta chain variable domain of TCR clone 394199 (TRBV6-3, TRBJ2-7)
CASSSPGTVFYEQYF

SEQ ID NO: 788399 - protein, 14 aa, Homo sapiens
  CDR3 for alpha chain variable domain of TCR clone 394200 (TRAV12-2, TRAJ45)
CAVNIGGGADGLTF

SEQ ID NO: 788400 - protein, 15 aa, Homo sapiens
  CDR3 for beta chain variable domain of TCR clone 394200 (TRBV27, TRBJ2-1)
CASSNGGGSSNEQFF

SEQ ID NO: 788401 - protein, 13 aa, Homo sapiens
  CDR3 for alpha chain variable domain of TCR clone 394201 (TRAV21, TRAJ57)
CAVTQGGPEKLAF

SEQ ID NO: 788402 - protein, 16 aa, Homo sapiens
  CDR3 for beta chain variable domain of TCR clone 394201 (TRBV29-1, TRBJ2-7)
CSVEDAEDGTAYEQYF

SEQ ID NO: 788403 - protein, 14 aa, Homo sapiens
  CDR3 for alpha chain variable domain of TCR clone 394202 (TRAV12-3, TRAJ22)
CAMSLFGSARQLTF

SEQ ID NO: 788404 - protein, 15 aa, Homo sapiens
  CDR3 for beta chain variable domain of TCR clone 394202 (TRBV19, TRBJ2-7)
CASSIGGGLVNEQYF

SEQ ID NO: 788405 - protein, 16 aa, Homo sapiens
  CDR3 for alpha chain variable domain of TCR clone 394203 (TRAV12-3, TRAJ53)
RAMSPGSGGSNYKLPF

SEQ ID NO: 788406 - protein, 11 aa, Homo sapiens
  CDR3 for beta chain variable domain of TCR clone 394203 (TRBV29-1, TRBJ2-5)
CSEDRTGTQYF

SEQ ID NO: 788407 - protein, 14 aa, Homo sapiens
  CDR3 for alpha chain variable domain of TCR clone 394204 (TRAV21, TRAJ35)
CAVMPIGFGNVLHC

SEQ ID NO: 788408 - protein, 14 aa, Homo sapiens
  CDR3 for beta chain variable domain of TCR clone 394204 (TRBV6-1, TRBJ1-3)
CASVQGGGGNTIYF

SEQ ID NO: 788409 - protein, 18 aa, Homo sapiens
  CDR3 for alpha chain variable domain of TCR clone 394205 (TRAV26-2, TRAJ45)
CILRDRVDQEEGLTELPL

SEQ ID NO: 788410 - protein, 15 aa, Homo sapiens
  CDR3 for beta chain variable domain of TCR clone 394205 (TRBV7-6, TRBJ2-5)
CASSKPTGPQETQYF

SEQ ID NO: 788411 - protein, 14 aa, Homo sapiens
  CDR3 for alpha chain variable domain of TCR clone 394206 (TRAV1-2, TRAJ8)
CAVREDTGFQKLVF

SEQ ID NO: 788412 - protein, 14 aa, Homo sapiens
  CDR3 for beta chain variable domain of TCR clone 394206 (TRBV16, TRBJ1-1)
CASSQAGPNTEAFF

SEQ ID NO: 788413 - protein, 14 aa, Homo sapiens
  CDR3 for alpha chain variable domain of TCR clone 394207 (TRAV12-2, TRAJ17)
CAVLFKAAGNKLTF

SEQ ID NO: 788414 - protein, 13 aa, Homo sapiens
  CDR3 for beta chain variable domain of TCR clone 394207 (TRBV12-4, TRBJ2-5)
CASSPGTEETQYF

SEQ ID NO: 788415 - protein, 13 aa, Homo sapiens
  CDR3 for alpha chain variable domain of TCR clone 394208 (TRAV35, TRAJ57)
CAGPQGGSEKLVF

SEQ ID NO: 788416 - protein, 14 aa, Homo sapiens
  CDR3 for beta chain variable domain of TCR clone 394208 (TRBV25-1, TRBJ1-1)
CASTHLGGNTEAFF

SEQ ID NO: 788417 - protein, 12 aa, Homo sapiens
  CDR3 for alpha chain variable domain of TCR clone 394209 (TRAV23/DV6, TRAJ53)
CAASKLGSGGSN

SEQ ID NO: 788418 - protein, 14 aa, Homo sapiens
  CDR3 for beta chain variable domain of TCR clone 394209 (TRBV7-2, TRBJ2-7)
CASSLYPGRYEQYF

SEQ ID NO: 788419 - protein, 14 aa, Homo sapiens
  CDR3 for alpha chain variable domain of TCR clone 394210 (TRAV13-1, TRAJ35)
CAASKGGFGNVLHC

SEQ ID NO: 788420 - protein, 12 aa, Homo sapiens
  CDR3 for beta chain variable domain of TCR clone 394210 (TRBV19, TRBJ1-5)
CASSIAQQPQHF

SEQ ID NO: 788421 - protein, 16 aa, Homo sapiens
  CDR3 for alpha chain variable domain of TCR clone 394211 (TRAV8-3, TRAJ42)
CSVGEGNGGSQGNPIF

SEQ ID NO: 788422 - protein, 14 aa, Homo sapiens
  CDR3 for beta chain variable domain of TCR clone 394211 (TRBV7-2, TRBJ2-1)
CASSRGGARNEQFF

SEQ ID NO: 788423 - protein, 11 aa, Homo sapiens
  CDR3 for alpha chain variable domain of TCR clone 394212 (TRAV17, TRAJ9)
CATTGGFRTIL

SEQ ID NO: 788424 - protein, 14 aa, Homo sapiens
  CDR3 for beta chain variable domain of TCR clone 394212 (TRBV7-9, TRBJ2-2)
CASSGLADTGELFF

SEQ ID NO: 788425 - protein, 13 aa, Homo sapiens
  CDR3 for alpha chain variable domain of TCR clone 394213 (TRAV30, TRAJ6)
CGFIEGGSYIPTF

SEQ ID NO: 788426 - protein, 15 aa, Homo sapiens
  CDR3 for beta chain variable domain of TCR clone 394213 (TRBV7-9, TRBJ1-4)
CASSRTGGFNEKLFF

SEQ ID NO: 788427 - protein, 16 aa, Homo sapiens
  CDR3 for alpha chain variable domain of TCR clone 394214 (TRAV26-1, TRAJ45)
CIVEKYSGGGADGLTF

SEQ ID NO: 788428 - protein, 14 aa, Homo sapiens
  CDR3 for beta chain variable domain of TCR clone 394214 (TRBV7-2, TRBJ2-7)
CASSPKTSFYEQYF

SEQ ID NO: 788429 - protein, 17 aa, Homo sapiens
  CDR3 for alpha chain variable domain of TCR clone 394215 (TRAV13-1, TRAJ52)
CAASSGAGGTGYGKLTF

SEQ ID NO: 788430 - protein, 17 aa, Homo sapiens
  CDR3 for beta chain variable domain of TCR clone 394215 (TRBV11-2, TRBJ2-1)
CASSLYPPGVEYNEQFF

SEQ ID NO: 788431 - protein, 14 aa, Homo sapiens
  CDR3 for alpha chain variable domain of TCR clone 394216 (TRAV8-4, TRAJ37)
CAVSEPRNTGKLIF

SEQ ID NO: 788432 - protein, 14 aa, Homo sapiens
  CDR3 for beta chain variable domain of TCR clone 394216 (TRBV28, TRBJ2-1)
CAIHRTGARTEQFF

SEQ ID NO: 788433 - protein, 14 aa, Homo sapiens
  CDR3 for alpha chain variable domain of TCR clone 394217 (TRAV17, TRAJ12)
CATDEKDSSYKLIF

SEQ ID NO: 788434 - protein, 15 aa, Homo sapiens
  CDR3 for beta chain variable domain of TCR clone 394217 (TRBV4-1, TRBJ1-2)
CASSQGQGAAYGYTF

SEQ ID NO: 788435 - protein, 17 aa, Homo sapiens
  CDR3 for alpha chain variable domain of TCR clone 394218 (TRAV12-3, TRAJ6)
CAMSARGGAGGSYIPTF

SEQ ID NO: 788436 - protein, 12 aa, Homo sapiens
  CDR3 for beta chain variable domain of TCR clone 394218 (TRBV12-4, TRBJ2-3)
CASSTLPDTQYF

SEQ ID NO: 788437 - protein, 16 aa, Homo sapiens
  CDR3 for alpha chain variable domain of TCR clone 394219 (TRAV4, TRAJ22)
CLVGDLYSGSARQLTF

SEQ ID NO: 788438 - protein, 14 aa, Homo sapiens
  CDR3 for beta chain variable domain of TCR clone 394219 (TRBV28, TRBJ1-2)
CASRIQGANYGYTF

SEQ ID NO: 788439 - protein, 13 aa, Homo sapiens
  CDR3 for alpha chain variable domain of TCR clone 394220 (TRAV12-1, TRAJ7)
CVVNMRGNNRLAF

SEQ ID NO: 788440 - protein, 13 aa, Homo sapiens
  CDR3 for beta chain variable domain of TCR clone 394220 (TRBV24-1, TRBJ2-2)
CATRVDNTGELFF

SEQ ID NO: 788441 - protein, 14 aa, Homo sapiens
  CDR3 for alpha chain variable domain of TCR clone 394221 (TRAV12-1, TRAJ43)
CVVNGRSNNNDMRF

SEQ ID NO: 788442 - protein, 15 aa, Homo sapiens
  CDR3 for beta chain variable domain of TCR clone 394221 (TRBV7-9, TRBJ1-4)
CASSRTGGFNEKLFF

SEQ ID NO: 788443 - protein, 15 aa, Homo sapiens
  CDR3 for alpha chain variable domain of TCR clone 394222 (TRAV8-4, TRAJ13)
CAVSDRGGGYQKVTF

SEQ ID NO: 788444 - protein, 14 aa, Homo sapiens
  CDR3 for beta chain variable domain of TCR clone 394222 (TRBV2, TRBJ1-5)
CASSGTGFNQPQHF

SEQ ID NO: 788445 - protein, 11 aa, Homo sapiens
  CDR3 for alpha chain variable domain of TCR clone 394223 (TRAV23/DV6, TRAJ44)
CAAPTPGKLTF

SEQ ID NO: 788446 - protein, 14 aa, Homo sapiens
  CDR3 for beta chain variable domain of TCR clone 394223 (TRBV20-1, TRBJ2-1)
CSAQIGGSANEQFF

SEQ ID NO: 788447 - protein, 13 aa, Homo sapiens
  CDR3 for alpha chain variable domain of TCR clone 394224 (TRAV17, TRAJ54)
CATDAGGGQKLVF

SEQ ID NO: 788448 - protein, 17 aa, Homo sapiens
  CDR3 for beta chain variable domain of TCR clone 394224 (TRBV25-1, TRBJ1-6)
CASSEYIGERGNSPLHF

SEQ ID NO: 788449 - protein, 15 aa, Homo sapiens
  CDR3 for alpha chain variable domain of TCR clone 394225 (TRAV3, TRAJ4)
CAVRDGTGGYNKLIC

SEQ ID NO: 788450 - protein, 16 aa, Homo sapiens
  CDR3 for beta chain variable domain of TCR clone 394225 (TRBV27, TRBJ2-2)
CASSSSGVSNTGELFF

SEQ ID NO: 788451 - protein, 15 aa, Homo sapiens
  CDR3 for alpha chain variable domain of TCR clone 394226 (TRAV17, TRAJ57)
FSTGPSQGGSEKLVF

SEQ ID NO: 788452 - protein, 16 aa, Homo sapiens
  CDR3 for beta chain variable domain of TCR clone 394226 (TRBV12-4, TRBJ1-5)
CASSRPVGGSNQPQHF

SEQ ID NO: 788453 - protein, 17 aa, Homo sapiens
  CDR3 for alpha chain variable domain of TCR clone 394227 (TRAV3, TRAJ42)
CAVRDRDYGGRQGNPIF

SEQ ID NO: 788454 - protein, 15 aa, Homo sapiens
  CDR3 for beta chain variable domain of TCR clone 394227 (TRBV6-6, TRBJ2-7)
CASSYSYGGSYEQYF

SEQ ID NO: 788455 - protein, 11 aa, Homo sapiens
  CDR3 for alpha chain variable domain of TCR clone 394228 (TRAV1-1, TRAJ23)
CAVRQGGKLIF

SEQ ID NO: 788456 - protein, 16 aa, Homo sapiens
  CDR3 for beta chain variable domain of TCR clone 394228 (TRBV28, TRBJ1-4)
CASSPPYRGRSEKLFF

SEQ ID NO: 788457 - protein, 17 aa, Homo sapiens
  CDR3 for alpha chain variable domain of TCR clone 394229 (TRAV3, TRAJ42)
CAVRDRDYGGSQGNLIF

SEQ ID NO: 788458 - protein, 15 aa, Homo sapiens
  CDR3 for beta chain variable domain of TCR clone 394229 (TRBV3-1, TRBJ2-1)
CASSQVVADGEEQFF

SEQ ID NO: 788459 - protein, 12 aa, Homo sapiens
  CDR3 for alpha chain variable domain of TCR clone 394230 (TRAV21, TRAJ49)
CAVSWTGNQFYF

SEQ ID NO: 788460 - protein, 13 aa, Homo sapiens
  CDR3 for beta chain variable domain of TCR clone 394230 (TRBV7-3, TRBJ1-1)
CASSQDWGAEAFF

SEQ ID NO: 788461 - protein, 15 aa, Homo sapiens
  CDR3 for alpha chain variable domain of TCR clone 394231 (TRAV35, TRAJ33)
CAGQPPRYSNYQLIW

SEQ ID NO: 788462 - protein, 16 aa, Homo sapiens
  CDR3 for beta chain variable domain of TCR clone 394231 (TRBV19, TRBJ2-1)
CASSKAGPSSYNEQFF

SEQ ID NO: 788463 - protein, 12 aa, Homo sapiens
  CDR3 for alpha chain variable domain of TCR clone 394232 (TRAV8-6, TRAJ43)
CAVSHNNNDMRF

SEQ ID NO: 788464 - protein, 14 aa, Homo sapiens
  CDR3 for beta chain variable domain of TCR clone 394232 (TRBV10-3, TRBJ1-1)
CAIIDGSGVTEAFF

SEQ ID NO: 788465 - protein, 18 aa, Homo sapiens
  CDR3 for alpha chain variable domain of TCR clone 394233 (TRAV27, )
CAVRTQIPNIQNPDPAVY

SEQ ID NO: 788466 - protein, 16 aa, Homo sapiens
  CDR3 for beta chain variable domain of TCR clone 394233 (TRBV5-1, TRBJ2-3)
CASSLGLAVYTDTQYF

SEQ ID NO: 788467 - protein, 15 aa, Homo sapiens
  CDR3 for alpha chain variable domain of TCR clone 394234 (TRAV2, TRAJ9)
CAVEDRGTGGFKSIF

SEQ ID NO: 788468 - protein, 16 aa, Homo sapiens
  CDR3 for beta chain variable domain of TCR clone 394234 (TRBV24-1, TRBJ2-3)
CATSAPGTGATDTQYF

SEQ ID NO: 788469 - protein, 13 aa, Homo sapiens
  CDR3 for alpha chain variable domain of TCR clone 394235 (TRAV12-1, TRAJ39)
CVVPQRAGNMRTF

SEQ ID NO: 788470 - protein, 11 aa, Homo sapiens
  CDR3 for beta chain variable domain of TCR clone 394235 (TRBV12-4, TRBJ2-7)
CASRQSYEQYF

SEQ ID NO: 788471 - protein, 15 aa, Homo sapiens
  CDR3 for alpha chain variable domain of TCR clone 394236 (TRAV23/DV6, TRAJ12)
CAAIDLGRMDSSYKL

SEQ ID NO: 788472 - protein, 15 aa, Homo sapiens
  CDR3 for beta chain variable domain of TCR clone 394236 (TRBV12-4, TRBJ2-5)
CASTLNSGRGETQYF

SEQ ID NO: 788473 - protein, 11 aa, Homo sapiens
  CDR3 for alpha chain variable domain of TCR clone 394237 (TRAV2, TRAJ23)
CAVETRGKPIF

SEQ ID NO: 788474 - protein, 14 aa, Homo sapiens
  CDR3 for beta chain variable domain of TCR clone 394237 (TRBV2, TRBJ2-3)
CASSEGQNTDTQYF

SEQ ID NO: 788475 - protein, 16 aa, Homo sapiens
  CDR3 for alpha chain variable domain of TCR clone 394238 (TRAV21, TRAJ37)
CAVSTAGFSNTGKLIF

SEQ ID NO: 788476 - protein, 13 aa, Homo sapiens
  CDR3 for beta chain variable domain of TCR clone 394238 (TRBV7-9, TRBJ2-5)
CASLPSGRETQYF

SEQ ID NO: 788477 - protein, 15 aa, Homo sapiens
  CDR3 for alpha chain variable domain of TCR clone 394239 (TRAV3, TRAJ22)
CAVRDRGGSARQLTF

SEQ ID NO: 788478 - protein, 17 aa, Homo sapiens
  CDR3 for beta chain variable domain of TCR clone 394239 (TRBV19, TRBJ2-6)
CASSSGTVFSGANVLTF

SEQ ID NO: 788479 - protein, 13 aa, Homo sapiens
  CDR3 for alpha chain variable domain of TCR clone 394240 (TRAV3, TRAJ21)
CAVREPDFNKFYF

SEQ ID NO: 788480 - protein, 14 aa, Homo sapiens
  CDR3 for beta chain variable domain of TCR clone 394240 (TRBV20-1, TRBJ2-3)
CSARGGTSTDTQYS

SEQ ID NO: 788481 - protein, 14 aa, Homo sapiens
  CDR3 for alpha chain variable domain of TCR clone 394241 (TRAV21, TRAJ21)
CAVKGFGNFNKFYF

SEQ ID NO: 788482 - protein, 13 aa, Homo sapiens
  CDR3 for beta chain variable domain of TCR clone 394241 (TRBV18, TRBJ1-1)
CASSAETKPEAFF

SEQ ID NO: 788483 - protein, 13 aa, Homo sapiens
  CDR3 for alpha chain variable domain of TCR clone 394242 (TRAV13-1, TRAJ5)
CAASDTGRRPLTF

SEQ ID NO: 788484 - protein, 12 aa, Homo sapiens
  CDR3 for beta chain variable domain of TCR clone 394242 (TRBV2, TRBJ2-1)
GRGLPSYNEQFF

SEQ ID NO: 788485 - protein, 12 aa, Homo sapiens
  CDR3 for alpha chain variable domain of TCR clone 394243 (TRAV12-1, TRAJ40)
CVVYSGTSKYIF

SEQ ID NO: 788486 - protein, 14 aa, Homo sapiens
  CDR3 for beta chain variable domain of TCR clone 394243 (TRBV7-9, TRBJ2-5)
CASSLDTAQETQYF

SEQ ID NO: 788487 - protein, 13 aa, Homo sapiens
  CDR3 for alpha chain variable domain of TCR clone 394244 (TRAV8-3, TRAJ44)
WAVVPGTASKLTF

SEQ ID NO: 788488 - protein, 14 aa, Homo sapiens
  CDR3 for beta chain variable domain of TCR clone 394244 (TRBV11-2, TRBJ2-3)
CASSRLARTDTQYF

SEQ ID NO: 788489 - protein, 14 aa, Homo sapiens
  CDR3 for alpha chain variable domain of TCR clone 394245 (TRAV20, TRAJ56)
CAVQFGGANSKLTF

SEQ ID NO: 788490 - protein, 16 aa, Homo sapiens
  CDR3 for beta chain variable domain of TCR clone 394245 (TRBV20-1, TRBJ2-7)
CSAKRGRSSYESTSGR

SEQ ID NO: 788491 - protein, 17 aa, Homo sapiens
  CDR3 for alpha chain variable domain of TCR clone 394246 (TRAV3, TRAJ28)
CAVREAYSGAGSYQLTF

SEQ ID NO: 788492 - protein, 14 aa, Homo sapiens
  CDR3 for beta chain variable domain of TCR clone 394246 (TRBV5-1, TRBJ2-2)
CASSLVEGSGELFF

SEQ ID NO: 788493 - protein, 15 aa, Homo sapiens
  CDR3 for alpha chain variable domain of TCR clone 394247 (TRAV4, TRAJ10)
CLVGDGSGGGNKLTI

SEQ ID NO: 788494 - protein, 15 aa, Homo sapiens
  CDR3 for beta chain variable domain of TCR clone 394247 (TRBV27, TRBJ2-3)
CASSSLAGVIDTQYF

SEQ ID NO: 788495 - protein, 15 aa, Homo sapiens
  CDR3 for alpha chain variable domain of TCR clone 394248 (TRAV3, TRAJ45)
CAVRTPWGGADGLTF

SEQ ID NO: 788496 - protein, 13 aa, Homo sapiens
  CDR3 for beta chain variable domain of TCR clone 394248 (TRBV7-3, TRBJ1-1)
CASSLDWGAEAFF

SEQ ID NO: 788497 - protein, 16 aa, Homo sapiens
  CDR3 for alpha chain variable domain of TCR clone 394249 (TRAV30, TRAJ24)
CGTEIVDADSWGKFQF

SEQ ID NO: 788498 - protein, 12 aa, Homo sapiens
  CDR3 for beta chain variable domain of TCR clone 394249 (TRBV12-4, TRBJ2-5)
CQQSRDRRDQYF

SEQ ID NO: 788499 - protein, 16 aa, Homo sapiens
  CDR3 for alpha chain variable domain of TCR clone 394250 (TRAV30, TRAJ24)
CGTEIVYADSWGKLQF

SEQ ID NO: 788500 - protein, 14 aa, Homo sapiens
  CDR3 for beta chain variable domain of TCR clone 394250 (TRBV12-5, TRBJ2-5)
CASGSRTHQETQYF

SEQ ID NO: 788501 - protein, 11 aa, Homo sapiens
  CDR3 for alpha chain variable domain of TCR clone 394251 (TRAV3, TRAJ17)
PRGAAGNKLTF

SEQ ID NO: 788502 - protein, 13 aa, Homo sapiens
  CDR3 for beta chain variable domain of TCR clone 394251 (TRBV19, TRBJ1-2)
CASSQGQVYGYTF

SEQ ID NO: 788503 - protein, 19 aa, Homo sapiens
  CDR3 for alpha chain variable domain of TCR clone 394252 (TRAV13-1, TRAJ52)
CAASPYQNAGGTSYGKLTF

SEQ ID NO: 788504 - protein, 12 aa, Homo sapiens
  CDR3 for beta chain variable domain of TCR clone 394252 (TRBV5-1, TRBJ2-5)
CASSLGLETQYF

SEQ ID NO: 788505 - protein, 22 aa, Homo sapiens
  CDR3 for alpha chain variable domain of TCR clone 394253 (TRAV13-1, TRAJ15)
NLKTRLSTSVQQINQAGTALIF

SEQ ID NO: 788506 - protein, 14 aa, Homo sapiens
  CDR3 for beta chain variable domain of TCR clone 394253 (TRBV7-9, TRBJ2-1)
CASSDNSGYNEQFF

SEQ ID NO: 788507 - protein, 13 aa, Homo sapiens
  CDR3 for alpha chain variable domain of TCR clone 394254 (TRAV2, TRAJ40)
CAVVTSGTYKYIF

SEQ ID NO: 788508 - protein, 16 aa, Homo sapiens
  CDR3 for beta chain variable domain of TCR clone 394254 (TRBV29-1, TRBJ2-6)
CSVEDITYPGANVLTF

SEQ ID NO: 788509 - protein, 17 aa, Homo sapiens
  CDR3 for alpha chain variable domain of TCR clone 394255 (TRAV8-6, TRAJ58)
CAVSSWVGETSGSRLTF

SEQ ID NO: 788510 - protein, 15 aa, Homo sapiens
  CDR3 for beta chain variable domain of TCR clone 394255 (TRBV12-4, TRBJ2-1)
CASSLSGGASNEQFF

SEQ ID NO: 788511 - protein, 11 aa, Homo sapiens
  CDR3 for alpha chain variable domain of TCR clone 394256 (TRAV21, TRAJ11)
CAVHGYSTLAF

SEQ ID NO: 788512 - protein, 11 aa, Homo sapiens
  CDR3 for beta chain variable domain of TCR clone 394256 (TRBV19, TRBJ1-1)
CASSIGSEAFF

SEQ ID NO: 788513 - protein, 15 aa, Homo sapiens
  CDR3 for alpha chain variable domain of TCR clone 394257 (TRAV38-2/DV8, TRAJ45)
CAYWDSGGGADGLTF

SEQ ID NO: 788514 - protein, 13 aa, Homo sapiens
  CDR3 for beta chain variable domain of TCR clone 394257 (TRBV20-1, TRBJ1-1)
CSAPLGGGTEAFF

SEQ ID NO: 788515 - protein, 13 aa, Homo sapiens
  CDR3 for alpha chain variable domain of TCR clone 394258 (TRAV35, TRAJ57)
CAGSQGGSEKLVF

SEQ ID NO: 788516 - protein, 14 aa, Homo sapiens
  CDR3 for beta chain variable domain of TCR clone 394258 (TRBV25-1, TRBJ1-1)
CASTHLGVNTEAFF

SEQ ID NO: 788517 - protein, 17 aa, Homo sapiens
  CDR3 for alpha chain variable domain of TCR clone 394259 (TRAV8-3, TRAJ32)
CAVGPLDYGGATNKPIF

SEQ ID NO: 788518 - protein, 15 aa, Homo sapiens
  CDR3 for beta chain variable domain of TCR clone 394259 (TRBV18, TRBJ1-2)
CASSPGNGLGYGYTF

SEQ ID NO: 788519 - protein, 14 aa, Homo sapiens
  CDR3 for alpha chain variable domain of TCR clone 394260 (TRAV1-2, TRAJ16)
CAFNRFSDGQKLLF

SEQ ID NO: 788520 - protein, 12 aa, Homo sapiens
  CDR3 for beta chain variable domain of TCR clone 394260 (TRBV11-3, TRBJ2-2)
CASSLGGGELFF

SEQ ID NO: 788521 - protein, 14 aa, Homo sapiens
  CDR3 for alpha chain variable domain of TCR clone 394261 (TRAV1-2, TRAJ16)
CAVNRFSDGQKLLF

SEQ ID NO: 788522 - protein, 13 aa, Homo sapiens
  CDR3 for beta chain variable domain of TCR clone 394261 (TRBV7-9, TRBJ1-2)
CASSLKQNYGYTF

SEQ ID NO: 788523 - protein, 12 aa, Homo sapiens
  CDR3 for alpha chain variable domain of TCR clone 394262 (TRAV4, TRAJ26)
CLVGDYGQNFVF

SEQ ID NO: 788524 - protein, 16 aa, Homo sapiens
  CDR3 for beta chain variable domain of TCR clone 394262 (TRBV12-4, TRBJ1-4)
CASSLKGIGHGEKLFF

SEQ ID NO: 788525 - protein, 14 aa, Homo sapiens
  CDR3 for alpha chain variable domain of TCR clone 394263 (TRAV26-1, TRAJ38)
RIADNAGNNRKLIW

SEQ ID NO: 788526 - protein, 15 aa, Homo sapiens
  CDR3 for beta chain variable domain of TCR clone 394263 (TRBV4-1, TRBJ1-1)
CASSQEWGHYTEAFF

SEQ ID NO: 788527 - protein, 15 aa, Homo sapiens
  CDR3 for alpha chain variable domain of TCR clone 394264 (TRAV3, TRAJ3)
CAVRDRDSSASKIIF

SEQ ID NO: 788528 - protein, 18 aa, Homo sapiens
  CDR3 for beta chain variable domain of TCR clone 394264 (TRBV7-9, TRBJ2-1)
CASSTGLAEGSSYNEQFF

SEQ ID NO: 788529 - protein, 16 aa, Homo sapiens
  CDR3 for alpha chain variable domain of TCR clone 394265 (TRAV13-2, TRAJ37)
CAENIRGSSNTGKLIF

SEQ ID NO: 788530 - protein, 15 aa, Homo sapiens
  CDR3 for beta chain variable domain of TCR clone 394265 (TRBV5-1, TRBJ2-7)
CDSSPQGRPLDEQYF

SEQ ID NO: 788531 - protein, 12 aa, Homo sapiens
  CDR3 for alpha chain variable domain of TCR clone 394266 (TRAV1-1, TRAJ9)
CAVETGGFKTIF

SEQ ID NO: 788532 - protein, 14 aa, Homo sapiens
  CDR3 for beta chain variable domain of TCR clone 394266 (TRBV7-8, TRBJ2-5)
CASSATGGQETQYF

SEQ ID NO: 788533 - protein, 12 aa, Homo sapiens
  CDR3 for alpha chain variable domain of TCR clone 394267 (TRAV13-2, TRAJ8)
CAPWIGFQKLVF

SEQ ID NO: 788534 - protein, 13 aa, Homo sapiens
  CDR3 for beta chain variable domain of TCR clone 394267 (TRBV12-4, TRBJ1-5)
CASSPDRAQPQHF

SEQ ID NO: 788535 - protein, 21 aa, Homo sapiens
  CDR3 for alpha chain variable domain of TCR clone 394268 (TRAV36/DV7, TRAJ39)
TATQTGDSAIYLPNAGNMLTF

SEQ ID NO: 788536 - protein, 16 aa, Homo sapiens
  CDR3 for beta chain variable domain of TCR clone 394268 (TRBV20-1, TRBJ1-4)
CSAPGQGLLTNEKLFF

SEQ ID NO: 788537 - protein, 14 aa, Homo sapiens
  CDR3 for alpha chain variable domain of TCR clone 394269 (TRAV26-1, TRAJ38)
CIADNAGNNRKLIW

SEQ ID NO: 788538 - protein, 15 aa, Homo sapiens
  CDR3 for beta chain variable domain of TCR clone 394269 (TRBV28, TRBJ1-5)
CASSRTGGYVQPQHF

SEQ ID NO: 788539 - protein, 17 aa, Homo sapiens
  CDR3 for alpha chain variable domain of TCR clone 394270 (TRAV8-4, TRAJ11)
CAVSDRGENSGNSTLTF

SEQ ID NO: 788540 - protein, 14 aa, Homo sapiens
  CDR3 for beta chain variable domain of TCR clone 394270 (TRBV20-1, TRBJ2-1)
CSPSDEASYNEQFF

SEQ ID NO: 788541 - protein, 12 aa, Homo sapiens
  CDR3 for alpha chain variable domain of TCR clone 394271 (TRAV8-3, TRAJ26)
CAGDNYGQNFVF

SEQ ID NO: 788542 - protein, 15 aa, Homo sapiens
  CDR3 for beta chain variable domain of TCR clone 394271 (TRBV25-1, TRBJ1-4)
CASSPGDSTNEKLFF

SEQ ID NO: 788543 - protein, 20 aa, Homo sapiens
  CDR3 for alpha chain variable domain of TCR clone 394272 (TRAV21, TRAJ4)
AASQPGDSATLAGGYNKLIF

SEQ ID NO: 788544 - protein, 19 aa, Homo sapiens
  CDR3 for beta chain variable domain of TCR clone 394272 (TRBV18, TRBJ1-3)
CASSSLSRTGMSSGNTIYF

SEQ ID NO: 788545 - protein, 16 aa, Homo sapiens
  CDR3 for alpha chain variable domain of TCR clone 394273 (TRAV16, TRAJ42)
CARRMNYGGSQGNLIF

SEQ ID NO: 788546 - protein, 16 aa, Homo sapiens
  CDR3 for beta chain variable domain of TCR clone 394273 (TRBV7-3, TRBJ2-2)
CASSLKRGTLSGELFF

SEQ ID NO: 788547 - protein, 14 aa, Homo sapiens
  CDR3 for alpha chain variable domain of TCR clone 394274 (TRAV1-2, TRAJ8)
CAVREDTGFQKLVF

SEQ ID NO: 788548 - protein, 14 aa, Homo sapiens
  CDR3 for beta chain variable domain of TCR clone 394274 (TRBV19, TRBJ1-2)
CASEGTGVTYGYTF

SEQ ID NO: 788549 - protein, 14 aa, Homo sapiens
  CDR3 for alpha chain variable domain of TCR clone 394275 (TRAV27, TRAJ49)
CSGRPEGTGNQFYF

SEQ ID NO: 788550 - protein, 15 aa, Homo sapiens
  CDR3 for beta chain variable domain of TCR clone 394275 (TRBV19, TRBJ2-1)
CASSIQATSYNEQFF

SEQ ID NO: 788551 - protein, 15 aa, Homo sapiens
  CDR3 for alpha chain variable domain of TCR clone 394276 (TRAV17, TRAJ23)
CATDAEDNQGGKLIF

SEQ ID NO: 788552 - protein, 15 aa, Homo sapiens
  CDR3 for beta chain variable domain of TCR clone 394276 (TRBV11-3, TRBJ2-3)
CASLKDGREGDTQYF

SEQ ID NO: 788553 - protein, 18 aa, Homo sapiens
  CDR3 for alpha chain variable domain of TCR clone 394277 (TRAV29/DV5, TRAJ53)
CSVLLCSKRGGSNYKLTF

SEQ ID NO: 788554 - protein, 17 aa, Homo sapiens
  CDR3 for beta chain variable domain of TCR clone 394277 (TRBV7-8, TRBJ2-6)
CASSAGTGGAGANVLTL

SEQ ID NO: 788555 - protein, 10 aa, Homo sapiens
  CDR3 for alpha chain variable domain of TCR clone 394278 (TRAV2, TRAJ34)
CAVVNDKLIF

SEQ ID NO: 788556 - protein, 14 aa, Homo sapiens
  CDR3 for beta chain variable domain of TCR clone 394278 (TRBV7-2, TRBJ2-7)
CASSPKTSFYEQYF

SEQ ID NO: 788557 - protein, 13 aa, Homo sapiens
  CDR3 for alpha chain variable domain of TCR clone 394279 (TRAV39, TRAJ49)
YAVDRNTGNQFYF

SEQ ID NO: 788558 - protein, 14 aa, Homo sapiens
  CDR3 for beta chain variable domain of TCR clone 394279 (TRBV4-1, TRBJ1-1)
CASSRSGQSFEAFF

SEQ ID NO: 788559 - protein, 12 aa, Homo sapiens
  CDR3 for alpha chain variable domain of TCR clone 394280 (TRAV27, TRAJ33)
FAGEDSNYQLIW

SEQ ID NO: 788560 - protein, 17 aa, Homo sapiens
  CDR3 for beta chain variable domain of TCR clone 394280 (TRBV7-3, TRBJ1-3)
CASSPLGRGTPGNTIYF

SEQ ID NO: 788561 - protein, 14 aa, Homo sapiens
  CDR3 for alpha chain variable domain of TCR clone 394281 (TRAV1-2, TRAJ8)
CAVREDTGFQKLVF

SEQ ID NO: 788562 - protein, 16 aa, Homo sapiens
  CDR3 for beta chain variable domain of TCR clone 394281 (TRBV20-1, TRBJ1-2)
CSASTFGGAENYGDTF

SEQ ID NO: 788563 - protein, 15 aa, Homo sapiens
  CDR3 for alpha chain variable domain of TCR clone 394282 (TRAV3, TRAJ13)
CAVRVYSGGYQKFTF

SEQ ID NO: 788564 - protein, 15 aa, Homo sapiens
  CDR3 for beta chain variable domain of TCR clone 394282 (TRBV5-7, TRBJ1-2)
CASSLGVAANYGYTF

SEQ ID NO: 788565 - protein, 12 aa, Homo sapiens
  CDR3 for alpha chain variable domain of TCR clone 394283 (TRAV1-1, TRAJ30)
CAVRGRDDKLIF

SEQ ID NO: 788566 - protein, 14 aa, Homo sapiens
  CDR3 for beta chain variable domain of TCR clone 394283 (TRBV6-1, TRBJ1-3)
CASVQGGGGNTIYF

SEQ ID NO: 788567 - protein, 15 aa, Homo sapiens
  CDR3 for alpha chain variable domain of TCR clone 394284 (TRAV17, TRAJ56)
CATDANTGANSKLTF

SEQ ID NO: 788568 - protein, 17 aa, Homo sapiens
  CDR3 for beta chain variable domain of TCR clone 394284 (TRBV20-1, TRBJ2-1)
CSASSSGLAGSYNEQFF

SEQ ID NO: 788569 - protein, 14 aa, Homo sapiens
  CDR3 for alpha chain variable domain of TCR clone 394285 (TRAV13-1, TRAJ40)
CAASMTSGTYKYIF

SEQ ID NO: 788570 - protein, 13 aa, Homo sapiens
  CDR3 for beta chain variable domain of TCR clone 394285 (TRBV4-1, TRBJ2-5)
CASSREVQENQYF

SEQ ID NO: 788571 - protein, 17 aa, Homo sapiens
  CDR3 for alpha chain variable domain of TCR clone 394286 (TRAV9-2, TRAJ10)
CALTVTILTGGGNKLTF

SEQ ID NO: 788572 - protein, 17 aa, Homo sapiens
  CDR3 for beta chain variable domain of TCR clone 394286 (TRBV6-3, TRBJ1-1)
CASSYSGRGCRNTEAFF

SEQ ID NO: 788573 - protein, 13 aa, Homo sapiens
  CDR3 for alpha chain variable domain of TCR clone 394287 (TRAV8-3, TRAJ43)
CAVVPYNKNDMRF

SEQ ID NO: 788574 - protein, 17 aa, Homo sapiens
  CDR3 for beta chain variable domain of TCR clone 394287 (TRBV7-7, TRBJ1-1)
CASIGDRPNLGVTEAFF

SEQ ID NO: 788575 - protein, 17 aa, Homo sapiens
  CDR3 for alpha chain variable domain of TCR clone 394288 (TRAV26-1, TRAJ37)
CIVRVITVSSNTGKLIF

SEQ ID NO: 788576 - protein, 14 aa, Homo sapiens
  CDR3 for beta chain variable domain of TCR clone 394288 (TRBV19, TRBJ2-1)
CASPTFVFSGEQFF

SEQ ID NO: 788577 - protein, 18 aa, Homo sapiens
  CDR3 for alpha chain variable domain of TCR clone 394289 (TRAV26-2, TRAJ54)
CILRDVEVGIQGAQKLVF

SEQ ID NO: 788578 - protein, 18 aa, Homo sapiens
  CDR3 for beta chain variable domain of TCR clone 394289 (TRBV11-2, TRBJ2-3)
RASSLGGASRGAPNTQYF

SEQ ID NO: 788579 - protein, 16 aa, Homo sapiens
  CDR3 for alpha chain variable domain of TCR clone 394290 (TRAV12-3, TRAJ53)
CAMSPGSGGSNYKLTF

SEQ ID NO: 788580 - protein, 11 aa, Homo sapiens
  CDR3 for beta chain variable domain of TCR clone 394290 (TRBV7-2, TRBJ2-3)
CASSASDTQYF

SEQ ID NO: 788581 - protein, 14 aa, Homo sapiens
  CDR3 for alpha chain variable domain of TCR clone 394291 (TRAV8-3, TRAJ4)
CAVGAAGGYNKLIF

SEQ ID NO: 788582 - protein, 16 aa, Homo sapiens
  CDR3 for beta chain variable domain of TCR clone 394291 (TRBV13, TRBJ2-5)
CASSRGAGIRQETQYF

SEQ ID NO: 788583 - protein, 12 aa, Homo sapiens
  CDR3 for alpha chain variable domain of TCR clone 394292 (TRAV12-3, TRAJ17)
CAMTLTGNKLTF

SEQ ID NO: 788584 - protein, 12 aa, Homo sapiens
  CDR3 for beta chain variable domain of TCR clone 394292 (TRBV27, TRBJ2-1)
CARTLGVGEQFF

SEQ ID NO: 788585 - protein, 14 aa, Homo sapiens
  CDR3 for alpha chain variable domain of TCR clone 394293 (TRAV29/DV5, TRAJ36)
CAARRKTGANTLFF

SEQ ID NO: 788586 - protein, 13 aa, Homo sapiens
  CDR3 for beta chain variable domain of TCR clone 394293 (TRBV15, TRBJ1-2)
CATSMTANYGYIF

SEQ ID NO: 788587 - protein, 12 aa, Homo sapiens
  CDR3 for alpha chain variable domain of TCR clone 394294 (TRAV12-3, TRAJ17)
CAMTLTGDKRTF

SEQ ID NO: 788588 - protein, 15 aa, Homo sapiens
  CDR3 for beta chain variable domain of TCR clone 394294 (TRBV20-1, TRBJ2-7)
CSARDRVSGMDEQYF

SEQ ID NO: 788589 - protein, 13 aa, Homo sapiens
  CDR3 for alpha chain variable domain of TCR clone 394295 (TRAV12-1, TRAJ16)
CVVNGPDGQKLLF

SEQ ID NO: 788590 - protein, 12 aa, Homo sapiens
  CDR3 for beta chain variable domain of TCR clone 394295 (TRBV2, TRBJ1-1)
CQESTGGFHAIF

SEQ ID NO: 788591 - protein, 15 aa, Homo sapiens
  CDR3 for alpha chain variable domain of TCR clone 394296 (TRAV12-2, TRAJ8)
CAVKEENTGFQKLVF

SEQ ID NO: 788592 - protein, 15 aa, Homo sapiens
  CDR3 for beta chain variable domain of TCR clone 394296 (TRBV28, TRBJ2-4)
CAAGSGTLLMGIQYF

SEQ ID NO: 788593 - protein, 15 aa, Homo sapiens
  CDR3 for alpha chain variable domain of TCR clone 394297 (TRAV17, TRAJ57)
CATGPSQGGSEKLVF

SEQ ID NO: 788594 - protein, 14 aa, Homo sapiens
  CDR3 for beta chain variable domain of TCR clone 394297 (TRBV4-1, TRBJ2-3)
CASSQDWSTDTQYF

SEQ ID NO: 788595 - protein, 14 aa, Homo sapiens
  CDR3 for alpha chain variable domain of TCR clone 394298 (TRAV23/DV6, TRAJ22)
CAADPSGSARQLTF

SEQ ID NO: 788596 - protein, 14 aa, Homo sapiens
  CDR3 for beta chain variable domain of TCR clone 394298 (TRBV5-1, TRBJ2-7)
CASSLWGAQDEQFF

SEQ ID NO: 788597 - protein, 14 aa, Homo sapiens
  CDR3 for alpha chain variable domain of TCR clone 394299 (TRAV29/DV5, TRAJ45)
CAASFRGGADGLTF

SEQ ID NO: 788598 - protein, 16 aa, Homo sapiens
  CDR3 for beta chain variable domain of TCR clone 394299 (TRBV29-1, TRBJ2-7)
CSVEDAEDGTAYEQYF

SEQ ID NO: 788599 - protein, 14 aa, Homo sapiens
  CDR3 for alpha chain variable domain of TCR clone 394300 (TRAV3, TRAJ27)
CAVRDDTNAGKSTF

SEQ ID NO: 788600 - protein, 13 aa, Homo sapiens
  CDR3 for beta chain variable domain of TCR clone 394300 (TRBV3-1, TRBJ1-1)
CASSPGVITEAFF

SEQ ID NO: 788601 - protein, 13 aa, Homo sapiens
  CDR3 for alpha chain variable domain of TCR clone 394301 (TRAV20, TRAJ21)
CAVEGYNFNKFYF

SEQ ID NO: 788602 - protein, 14 aa, Homo sapiens
  CDR3 for beta chain variable domain of TCR clone 394301 (TRBV7-2, TRBJ2-7)
CASSPKTSFYEQYF

SEQ ID NO: 788603 - protein, 11 aa, Homo sapiens
  CDR3 for alpha chain variable domain of TCR clone 394302 (TRAV26-1, TRAJ27)
CIDPNAGKSTF

SEQ ID NO: 788604 - protein, 13 aa, Homo sapiens
  CDR3 for beta chain variable domain of TCR clone 394302 (TRBV3-1, TRBJ1-1)
CAGSPGVITEAFF

SEQ ID NO: 788605 - protein, 17 aa, Homo sapiens
  CDR3 for alpha chain variable domain of TCR clone 394303 (TRAV20, TRAJ57)
CAVQAIVAQGGSEKLVF

SEQ ID NO: 788606 - protein, 13 aa, Homo sapiens
  CDR3 for beta chain variable domain of TCR clone 394303 (TRBV20-1, TRBJ2-5)
CSAFGGGGETQYF

SEQ ID NO: 788607 - protein, 15 aa, Homo sapiens
  CDR3 for alpha chain variable domain of TCR clone 394304 (TRAV35, TRAJ50)
CAGQLRKTSYDKVIF

SEQ ID NO: 788608 - protein, 12 aa, Homo sapiens
  CDR3 for beta chain variable domain of TCR clone 394304 (TRBV5-1, TRBJ2-5)
CASSLGLEQQYF

SEQ ID NO: 788609 - protein, 11 aa, Homo sapiens
  CDR3 for alpha chain variable domain of TCR clone 394305 (TRAV2, TRAJ13)
CASGGYQKVTF

SEQ ID NO: 788610 - protein, 16 aa, Homo sapiens
  CDR3 for beta chain variable domain of TCR clone 394305 (TRBV7-2, TRBJ2-6)
CASSERRASGANVLTF

SEQ ID NO: 788611 - protein, 15 aa, Homo sapiens
  CDR3 for alpha chain variable domain of TCR clone 394306 (TRAV8-3, TRAJ27)
CAVGPSKTNAGKLTV

SEQ ID NO: 788612 - protein, 15 aa, Homo sapiens
  CDR3 for beta chain variable domain of TCR clone 394306 (TRBV7-2, TRBJ2-1)
CASSSGLAGGNEQFF

SEQ ID NO: 788613 - protein, 14 aa, Homo sapiens
  CDR3 for alpha chain variable domain of TCR clone 394307 (TRAV12-3, TRAJ10)
SHLPLTGGENKLTF

SEQ ID NO: 788614 - protein, 14 aa, Homo sapiens
  CDR3 for beta chain variable domain of TCR clone 394307 (TRBV6-1, TRBJ1-3)
CASVQGGGGNTIYF

SEQ ID NO: 788615 - protein, 14 aa, Homo sapiens
  CDR3 for alpha chain variable domain of TCR clone 394308 (TRAV29/DV5, TRAJ45)
CAASFRGGADGLTF

SEQ ID NO: 788616 - protein, 15 aa, Homo sapiens
  CDR3 for beta chain variable domain of TCR clone 394308 (TRBV18, TRBJ1-1)
CASSPRQGENTEAFF

SEQ ID NO: 788617 - protein, 13 aa, Homo sapiens
  CDR3 for alpha chain variable domain of TCR clone 394309 (TRAV17, TRAJ22)
CAHHSGSARQLTF

SEQ ID NO: 788618 - protein, 13 aa, Homo sapiens
  CDR3 for beta chain variable domain of TCR clone 394309 (TRBV27, TRBJ1-4)
CASSLMGDEKLLF

SEQ ID NO: 788619 - protein, 13 aa, Homo sapiens
  CDR3 for alpha chain variable domain of TCR clone 394310 (TRAV30, TRAJ49)
CGTEPNTGNQFYF

SEQ ID NO: 788620 - protein, 14 aa, Homo sapiens
  CDR3 for beta chain variable domain of TCR clone 394310 (TRBV29-1, TRBJ2-1)
CSVEFRGIPVEQFF

SEQ ID NO: 788621 - protein, 14 aa, Homo sapiens
  CDR3 for alpha chain variable domain of TCR clone 394311 (TRAV16, TRAJ32)
CAISRGGATNKLIF

SEQ ID NO: 788622 - protein, 15 aa, Homo sapiens
  CDR3 for beta chain variable domain of TCR clone 394311 (TRBV7-9, TRBJ1-5)
CASSQGHQPNQPQHF

SEQ ID NO: 788623 - protein, 12 aa, Homo sapiens
  CDR3 for alpha chain variable domain of TCR clone 394312 (TRAV2, TRAJ26)
CAVGEYGQNFVF

SEQ ID NO: 788624 - protein, 16 aa, Homo sapiens
  CDR3 for beta chain variable domain of TCR clone 394312 (TRBV7-3, TRBJ2-1)
CASSLEGYRSYNEQFF

SEQ ID NO: 788625 - protein, 15 aa, Homo sapiens
  CDR3 for alpha chain variable domain of TCR clone 394313 (TRAV13-1, TRAJ44)
CAASRGGGTASKLTF

SEQ ID NO: 788626 - protein, 17 aa, Homo sapiens
  CDR3 for beta chain variable domain of TCR clone 394313 (TRBV7-8, TRBJ2-6)
CASSAGTGGAGANVLTF

SEQ ID NO: 788627 - protein, 15 aa, Homo sapiens
  CDR3 for alpha chain variable domain of TCR clone 394314 (TRAV26-1, TRAJ39)
CIVRDGSNAGNMLTL

SEQ ID NO: 788628 - protein, 14 aa, Homo sapiens
  CDR3 for beta chain variable domain of TCR clone 394314 (TRBV10-3, TRBJ1-2)
CAIRAGTGDYGYTF

SEQ ID NO: 788629 - protein, 16 aa, Homo sapiens
  CDR3 for alpha chain variable domain of TCR clone 394315 (TRAV23/DV6, )
CAEPDIRNPDPAVYQL

SEQ ID NO: 788630 - protein, 15 aa, Homo sapiens
  CDR3 for beta chain variable domain of TCR clone 394315 (TRBV12-4, TRBJ2-5)
CASTLNSGRGETQYF

SEQ ID NO: 788631 - protein, 12 aa, Homo sapiens
  CDR3 for alpha chain variable domain of TCR clone 394316 (TRAV12-1, TRAJ31)
CVSWNNNARLMF

SEQ ID NO: 788632 - protein, 15 aa, Homo sapiens
  CDR3 for beta chain variable domain of TCR clone 394316 (TRBV7-2, TRBJ1-5)
CASSLDRGKDQPQHF

SEQ ID NO: 788633 - protein, 15 aa, Homo sapiens
  CDR3 for alpha chain variable domain of TCR clone 394317 (TRAV25, TRAJ53)
CPTSNSGGSNYKLTF

SEQ ID NO: 788634 - protein, 15 aa, Homo sapiens
  CDR3 for beta chain variable domain of TCR clone 394317 (TRBV28, TRBJ2-7)
CASSPGGRGFYEQYV

SEQ ID NO: 788635 - protein, 12 aa, Homo sapiens
  CDR3 for alpha chain variable domain of TCR clone 394318 (TRAV3, TRAJ43)
CAVRDPNNDMRF

SEQ ID NO: 788636 - protein, 14 aa, Homo sapiens
  CDR3 for beta chain variable domain of TCR clone 394318 (TRBV4-1, TRBJ2-2)
CASCQAVNTGELFF

SEQ ID NO: 788637 - protein, 11 aa, Homo sapiens
  CDR3 for alpha chain variable domain of TCR clone 394319 (TRAV3, TRAJ21)
CAVGNFNKFYF

SEQ ID NO: 788638 - protein, 11 aa, Homo sapiens
  CDR3 for beta chain variable domain of TCR clone 394319 (TRBV11-2, TRBJ2-2)
CQQPWRRELFF

SEQ ID NO: 788639 - protein, 13 aa, Homo sapiens
  CDR3 for alpha chain variable domain of TCR clone 394320 (TRAV27, TRAJ45)
CRGSGGGADGLTF

SEQ ID NO: 788640 - protein, 13 aa, Homo sapiens
  CDR3 for beta chain variable domain of TCR clone 394320 (TRBV19, TRBJ2-7)
CASSGQGVHEQYF

SEQ ID NO: 788641 - protein, 13 aa, Homo sapiens
  CDR3 for alpha chain variable domain of TCR clone 394321 (TRAV3, TRAJ20)
CAVRSLNDYKLSF

SEQ ID NO: 788642 - protein, 14 aa, Homo sapiens
  CDR3 for beta chain variable domain of TCR clone 394321 (TRBV7-3, TRBJ1-1)
CASSLKGGNTEAFF

SEQ ID NO: 788643 - protein, 15 aa, Homo sapiens
  CDR3 for alpha chain variable domain of TCR clone 394322 (TRAV10, TRAJ39)
CVVSPNNNAGNMLTF

SEQ ID NO: 788644 - protein, 17 aa, Homo sapiens
  CDR3 for beta chain variable domain of TCR clone 394322 (TRBV13, TRBJ2-3)
CASSLSRVAGGRNTQYF

SEQ ID NO: 788645 - protein, 20 aa, Homo sapiens
  CDR3 for alpha chain variable domain of TCR clone 394323 (TRAV26-1, TRAJ42)
CCVLLHRQTYYGGSQGNLIF

SEQ ID NO: 788646 - protein, 16 aa, Homo sapiens
  CDR3 for beta chain variable domain of TCR clone 394323 (TRBV7-3, TRBJ2-2)
CASSLKRGTLSGEVFF

SEQ ID NO: 788647 - protein, 15 aa, Homo sapiens
  CDR3 for alpha chain variable domain of TCR clone 394324 (TRAV12-2, TRAJ53)
CDVNGGGGSNYKLTF

SEQ ID NO: 788648 - protein, 14 aa, Homo sapiens
  CDR3 for beta chain variable domain of TCR clone 394324 (TRBV19, TRBJ2-2)
CASSTLHRSGELFF

SEQ ID NO: 788649 - protein, 10 aa, Homo sapiens
  CDR3 for alpha chain variable domain of TCR clone 394325 (TRAV38-1, TRAJ34)
CAFMDDKLIF

SEQ ID NO: 788650 - protein, 14 aa, Homo sapiens
  CDR3 for beta chain variable domain of TCR clone 394325 (TRBV7-2, TRBJ2-2)
CASILNSNTGELFF

SEQ ID NO: 788651 - protein, 14 aa, Homo sapiens
  CDR3 for alpha chain variable domain of TCR clone 394326 (TRAV12-2, TRAJ13)
CAVKNTGGYQKVTF

SEQ ID NO: 788652 - protein, 15 aa, Homo sapiens
  CDR3 for beta chain variable domain of TCR clone 394326 (TRBV20-1, TRBJ2-7)
CSAESGTSGAYEQYF

SEQ ID NO: 788653 - protein, 15 aa, Homo sapiens
  CDR3 for alpha chain variable domain of TCR clone 394327 (TRAV25, TRAJ52)
CAGRPGGTSYGELTF

SEQ ID NO: 788654 - protein, 17 aa, Homo sapiens
  CDR3 for beta chain variable domain of TCR clone 394327 (TRBV7-8, TRBJ2-6)
GASSAGTGGAGANVLTL

SEQ ID NO: 788655 - protein, 13 aa, Homo sapiens
  CDR3 for alpha chain variable domain of TCR clone 394328 (TRAV17, TRAJ5)
CAPMDTGRRALTF

SEQ ID NO: 788656 - protein, 13 aa, Homo sapiens
  CDR3 for beta chain variable domain of TCR clone 394328 (TRBV5-4, TRBJ2-5)
CASSRQEGETQYF

SEQ ID NO: 788657 - protein, 16 aa, Homo sapiens
  CDR3 for alpha chain variable domain of TCR clone 394329 (TRAV4, TRAJ9)
CLVGDPNRPGGFKTIF

SEQ ID NO: 788658 - protein, 16 aa, Homo sapiens
  CDR3 for beta chain variable domain of TCR clone 394329 (TRBV28, TRBJ1-4)
CASSPAYRGRSEKLFF

SEQ ID NO: 788659 - protein, 13 aa, Homo sapiens
  CDR3 for alpha chain variable domain of TCR clone 394330 (TRAV17, TRAJ40)
CAGALGGTYKYIF

SEQ ID NO: 788660 - protein, 13 aa, Homo sapiens
  CDR3 for beta chain variable domain of TCR clone 394330 (TRBV7-2, TRBJ1-2)
CASSLKQNYGYTF

SEQ ID NO: 788661 - protein, 11 aa, Homo sapiens
  CDR3 for alpha chain variable domain of TCR clone 394331 (TRAV12-3, TRAJ43)
CAMSVSNDMRF

SEQ ID NO: 788662 - protein, 12 aa, Homo sapiens
  CDR3 for beta chain variable domain of TCR clone 394331 (TRBV20-1, TRBJ1-1)
QCSTWGGTEALF

SEQ ID NO: 788663 - protein, 15 aa, Homo sapiens
  CDR3 for alpha chain variable domain of TCR clone 394332 (TRAV8-4, TRAJ42)
CAVSDDRGSQGNPIF

SEQ ID NO: 788664 - protein, 13 aa, Homo sapiens
  CDR3 for beta chain variable domain of TCR clone 394332 (TRBV7-9, TRBJ1-2)
CASSLKQNYGYTF

SEQ ID NO: 788665 - protein, 20 aa, Homo sapiens
  CDR3 for alpha chain variable domain of TCR clone 394333 (TRAV30, TRAJ32)
RNLPLRHREGYGGATNKLIF

SEQ ID NO: 788666 - protein, 13 aa, Homo sapiens
  CDR3 for beta chain variable domain of TCR clone 394333 (TRBV10-3, TRBJ2-7)
CASKLAVNYEQYF

SEQ ID NO: 788667 - protein, 20 aa, Homo sapiens
  CDR3 for alpha chain variable domain of TCR clone 394334 (TRAV26-1, TRAJ42)
CCVLLHRQTYYGGSQGNLIF

SEQ ID NO: 788668 - protein, 12 aa, Homo sapiens
  CDR3 for beta chain variable domain of TCR clone 394334 (TRBV7-3, TRBJ2-1)
CASSFINNEQFF

SEQ ID NO: 788669 - protein, 17 aa, Homo sapiens
  CDR3 for alpha chain variable domain of TCR clone 394335 (TRAV1-1, TRAJ15)
CLLLLRCPNQAGTALIF

SEQ ID NO: 788670 - protein, 15 aa, Homo sapiens
  CDR3 for beta chain variable domain of TCR clone 394335 (TRBV27, TRBJ2-3)
CASSLGLAGQDTQYF

SEQ ID NO: 788671 - protein, 14 aa, Homo sapiens
  CDR3 for alpha chain variable domain of TCR clone 394336 (TRAV1-2, TRAJ16)
CAVNRFSDGQKLLF

SEQ ID NO: 788672 - protein, 13 aa, Homo sapiens
  CDR3 for beta chain variable domain of TCR clone 394336 (TRBV12-4, TRBJ1-1)
CASSLGTGFEAFF

SEQ ID NO: 788673 - protein, 14 aa, Homo sapiens
  CDR3 for alpha chain variable domain of TCR clone 394337 (TRAV2, TRAJ37)
CAVDFTSNTGKLIF

SEQ ID NO: 788674 - protein, 18 aa, Homo sapiens
  CDR3 for beta chain variable domain of TCR clone 394337 (TRBV20-1, TRBJ2-1)
GSARGDRGPLGIQNEQFF

SEQ ID NO: 788675 - protein, 14 aa, Homo sapiens
  CDR3 for alpha chain variable domain of TCR clone 394338 (TRAV17, TRAJ6)
CATDASGGSYIPTF

SEQ ID NO: 788676 - protein, 13 aa, Homo sapiens
  CDR3 for beta chain variable domain of TCR clone 394338 (TRBV7-7, TRBJ1-1)
CASSLGANTEAFF

SEQ ID NO: 788677 - protein, 16 aa, Homo sapiens
  CDR3 for alpha chain variable domain of TCR clone 394339 (TRAV3, TRAJ37)
CAVRTHGSGNTGKLIF

SEQ ID NO: 788678 - protein, 16 aa, Homo sapiens
  CDR3 for beta chain variable domain of TCR clone 394339 (TRBV9, TRBJ1-2)
CASSVEEKVSPYGYTF

SEQ ID NO: 788679 - protein, 16 aa, Homo sapiens
  CDR3 for alpha chain variable domain of TCR clone 394340 (TRAV29/DV5, TRAJ28)
CAADAYSGAGSYQLTF

SEQ ID NO: 788680 - protein, 15 aa, Homo sapiens
  CDR3 for beta chain variable domain of TCR clone 394340 (TRBV24-1, TRBJ1-4)
YATSDPQGADEKLFF

SEQ ID NO: 788681 - protein, 12 aa, Homo sapiens
  CDR3 for alpha chain variable domain of TCR clone 394341 (TRAV8-3, TRAJ20)
CAVGANDYKLSF

SEQ ID NO: 788682 - protein, 16 aa, Homo sapiens
  CDR3 for beta chain variable domain of TCR clone 394341 (TRBV13, TRBJ2-2)
CASSPRTGEHTGELFF

SEQ ID NO: 788683 - protein, 15 aa, Homo sapiens
  CDR3 for alpha chain variable domain of TCR clone 394342 (TRAV26-1, TRAJ29)
CIVRVEGSGNTPLVF

SEQ ID NO: 788684 - protein, 15 aa, Homo sapiens
  CDR3 for beta chain variable domain of TCR clone 394342 (TRBV7-9, TRBJ1-5)
CASTQGHQPNQPQHC

SEQ ID NO: 788685 - protein, 17 aa, Homo sapiens
  CDR3 for alpha chain variable domain of TCR clone 394343 (TRAV3, TRAJ6)
CAVRDGPRAGGSYLPPF

SEQ ID NO: 788686 - protein, 14 aa, Homo sapiens
  CDR3 for beta chain variable domain of TCR clone 394343 (TRBV7-2, TRBJ2-7)
RASSPKTSFYEQYF

SEQ ID NO: 788687 - protein, 15 aa, Homo sapiens
  CDR3 for alpha chain variable domain of TCR clone 394344 (TRAV3, TRAJ24)
CAVRDKMTAGRNCSL

SEQ ID NO: 788688 - protein, 14 aa, Homo sapiens
  CDR3 for beta chain variable domain of TCR clone 394344 (TRBV7-2, TRBJ2-3)
CASSQTGSSYSQYF

SEQ ID NO: 788689 - protein, 15 aa, Homo sapiens
  CDR3 for alpha chain variable domain of TCR clone 394345 (TRAV3, TRAJ22)
RAVRDRGGSARQLTF

SEQ ID NO: 788690 - protein, 12 aa, Homo sapiens
  CDR3 for beta chain variable domain of TCR clone 394345 (TRBV12-4, TRBJ1-2)
CASSFTWLHLRF

SEQ ID NO: 788691 - protein, 18 aa, Homo sapiens
  CDR3 for alpha chain variable domain of TCR clone 394346 (TRAV26-1, TRAJ38)
CCVLLHRRNAGNNRKLIW

SEQ ID NO: 788692 - protein, 16 aa, Homo sapiens
  CDR3 for beta chain variable domain of TCR clone 394346 (TRBV20-1, TRBJ2-7)
CSASTSGRLSSYEQYF

SEQ ID NO: 788693 - protein, 13 aa, Homo sapiens
  CDR3 for alpha chain variable domain of TCR clone 394347 (TRAV8-3, TRAJ43)
CAVVPYNNNDMRF

SEQ ID NO: 788694 - protein, 17 aa, Homo sapiens
  CDR3 for beta chain variable domain of TCR clone 394347 (TRBV7-7, TRBJ1-1)
CAIIGDRPNLGVTEAFF

SEQ ID NO: 788695 - protein, 11 aa, Homo sapiens
  CDR3 for alpha chain variable domain of TCR clone 394348 (TRAV3, TRAJ21)
CAVGNFNKFYF

SEQ ID NO: 788696 - protein, 14 aa, Homo sapiens
  CDR3 for beta chain variable domain of TCR clone 394348 (TRBV29-1, TRBJ2-5)
CSFWTPYAGETQYF

SEQ ID NO: 788697 - protein, 14 aa, Homo sapiens
  CDR3 for alpha chain variable domain of TCR clone 394349 (TRAV12-2, TRAJ40)
CAVKIPSETYKYIF

SEQ ID NO: 788698 - protein, 17 aa, Homo sapiens
  CDR3 for beta chain variable domain of TCR clone 394349 (TRBV11-2, TRBJ2-1)
CASSLYPPGVEYNEQFF

SEQ ID NO: 788699 - protein, 15 aa, Homo sapiens
  CDR3 for alpha chain variable domain of TCR clone 394350 (TRAV13-1, TRAJ48)
CAPLGSNFGNEKLTF

SEQ ID NO: 788700 - protein, 13 aa, Homo sapiens
  CDR3 for beta chain variable domain of TCR clone 394350 (TRBV6-1, TRBJ1-1)
CASSRQGNTEAFF

SEQ ID NO: 788701 - protein, 14 aa, Homo sapiens
  CDR3 for alpha chain variable domain of TCR clone 394351 (TRAV17, TRAJ48)
CATEGNFGNEKLTF

SEQ ID NO: 788702 - protein, 16 aa, Homo sapiens
  CDR3 for beta chain variable domain of TCR clone 394351 (TRBV7-7, TRBJ2-1)
CASSLASGTSYNEQFF

SEQ ID NO: 788703 - protein, 15 aa, Homo sapiens
  CDR3 for alpha chain variable domain of TCR clone 394352 (TRAV26-2, TRAJ26)
CILRDFDNYGQNFVF

SEQ ID NO: 788704 - protein, 13 aa, Homo sapiens
  CDR3 for beta chain variable domain of TCR clone 394352 (TRBV10-3, TRBJ2-7)
CASKLAVNYEQYF

SEQ ID NO: 788705 - protein, 16 aa, Homo sapiens
  CDR3 for alpha chain variable domain of TCR clone 394353 (TRAV4, TRAJ18)
CCVILIGGSTLGRLYF

SEQ ID NO: 788706 - protein, 15 aa, Homo sapiens
  CDR3 for beta chain variable domain of TCR clone 394353 (TRBV7-8, TRBJ2-1)
CASSLAGGLYNEQFF

SEQ ID NO: 788707 - protein, 15 aa, Homo sapiens
  CDR3 for alpha chain variable domain of TCR clone 394354 (TRAV3, TRAJ32)
CAVRDPSGATNKLIF

SEQ ID NO: 788708 - protein, 13 aa, Homo sapiens
  CDR3 for beta chain variable domain of TCR clone 394354 (TRBV12-5, TRBJ2-3)
CASGDRQSDTQYF

SEQ ID NO: 788709 - protein, 13 aa, Homo sapiens
  CDR3 for alpha chain variable domain of TCR clone 394355 (TRAV2, TRAJ15)
CAVASQAGTALIF

SEQ ID NO: 788710 - protein, 12 aa, Homo sapiens
  CDR3 for beta chain variable domain of TCR clone 394355 (TRBV12-4, TRBJ2-1)
CASSLQGSEQFF

SEQ ID NO: 788711 - protein, 18 aa, Homo sapiens
  CDR3 for alpha chain variable domain of TCR clone 394356 (TRAV17, TRAJ45)
CATSLDLYSGGGADGLTF

SEQ ID NO: 788712 - protein, 13 aa, Homo sapiens
  CDR3 for beta chain variable domain of TCR clone 394356 (TRBV12-5, TRBJ2-3)
CASGDRQSDTQYF

SEQ ID NO: 788713 - protein, 12 aa, Homo sapiens
  CDR3 for alpha chain variable domain of TCR clone 394357 (TRAV8-3, TRAJ26)
CAGDNYGQNTVF

SEQ ID NO: 788714 - protein, 13 aa, Homo sapiens
  CDR3 for beta chain variable domain of TCR clone 394357 (TRBV27, TRBJ1-1)
CASSLSIGAEAFF

SEQ ID NO: 788715 - protein, 12 aa, Homo sapiens
  CDR3 for alpha chain variable domain of TCR clone 394358 (TRAV16, TRAJ26)
CASKDGGQNFVF

SEQ ID NO: 788716 - protein, 13 aa, Homo sapiens
  CDR3 for beta chain variable domain of TCR clone 394358 (TRBV25-1, TRBJ1-1)
CASSNRGRAEAFF

SEQ ID NO: 788717 - protein, 13 aa, Homo sapiens
  CDR3 for alpha chain variable domain of TCR clone 394359 (TRAV26-2, TRAJ43)
CILRAVNNNDIRF

SEQ ID NO: 788718 - protein, 13 aa, Homo sapiens
  CDR3 for beta chain variable domain of TCR clone 394359 (TRBV10-3, TRBJ2-7)
CASKLAVNYEQYF

SEQ ID NO: 788719 - protein, 12 aa, Homo sapiens
  CDR3 for alpha chain variable domain of TCR clone 394360 (TRAV12-3, TRAJ17)
CAMTLTGNKLTF

SEQ ID NO: 788720 - protein, 14 aa, Homo sapiens
  CDR3 for beta chain variable domain of TCR clone 394360 (TRBV6-1, TRBJ1-3)
CASVQGGGGKTIYF

SEQ ID NO: 788721 - protein, 13 aa, Homo sapiens
  CDR3 for alpha chain variable domain of TCR clone 394361 (TRAV12-2, TRAJ52)
CAVSGTSYGKLTF

SEQ ID NO: 788722 - protein, 14 aa, Homo sapiens
  CDR3 for beta chain variable domain of TCR clone 394361 (TRBV19, TRBJ2-2)
CASSGQGIAGELFF

SEQ ID NO: 788723 - protein, 14 aa, Homo sapiens
  CDR3 for alpha chain variable domain of TCR clone 394362 (TRAV12-2, TRAJ17)
CAVLFKAAGNNLTF

SEQ ID NO: 788724 - protein, 12 aa, Homo sapiens
  CDR3 for beta chain variable domain of TCR clone 394362 (TRBV12-4, TRBJ1-2)
CASSFIWLHLRF

SEQ ID NO: 788725 - protein, 13 aa, Homo sapiens
  CDR3 for alpha chain variable domain of TCR clone 394363 (TRAV27, TRAJ41)
CAGEGNSGYGLNF

SEQ ID NO: 788726 - protein, 13 aa, Homo sapiens
  CDR3 for beta chain variable domain of TCR clone 394363 (TRBV27, TRBJ2-7)
CASSFVSSYEQYF

SEQ ID NO: 788727 - protein, 17 aa, Homo sapiens
  CDR3 for alpha chain variable domain of TCR clone 394364 (TRAV13-1, TRAJ28)
CAASPPYTGAGSYQLTF

SEQ ID NO: 788728 - protein, 12 aa, Homo sapiens
  CDR3 for beta chain variable domain of TCR clone 394364 (TRBV11-2, TRBJ2-2)
CASSLPTGELFS

SEQ ID NO: 788729 - protein, 14 aa, Homo sapiens
  CDR3 for alpha chain variable domain of TCR clone 394365 (TRAV12-1, TRAJ12)
CVVTRMDSSYKLIF

SEQ ID NO: 788730 - protein, 17 aa, Homo sapiens
  CDR3 for beta chain variable domain of TCR clone 394365 (TRBV11-2, TRBJ2-1)
CASSLYPPGVEYNEQFF

SEQ ID NO: 788731 - protein, 11 aa, Homo sapiens
  CDR3 for alpha chain variable domain of TCR clone 394366 (TRAV1-2, TRAJ11)
CAVRGYSTLTF

SEQ ID NO: 788732 - protein, 14 aa, Homo sapiens
  CDR3 for beta chain variable domain of TCR clone 394366 (TRBV19, TRBJ2-2)
CASSTLHRSGELFF

SEQ ID NO: 788733 - protein, 21 aa, Homo sapiens
  CDR3 for alpha chain variable domain of TCR clone 394367 (TRAV12-1, TRAJ37)
CVVNGGLWQHRQTNLWARDTF

SEQ ID NO: 788734 - protein, 12 aa, Homo sapiens
  CDR3 for beta chain variable domain of TCR clone 394367 (TRBV20-1, TRBJ1-2)
CSAPGFNYGYTF

SEQ ID NO: 788735 - protein, 11 aa, Homo sapiens
  CDR3 for alpha chain variable domain of TCR clone 394368 (TRAV4, TRAJ31)
CLVGDNARLMF

SEQ ID NO: 788736 - protein, 16 aa, Homo sapiens
  CDR3 for beta chain variable domain of TCR clone 394368 (TRBV7-2, TRBJ2-5)
CASSSKWLSGQEPQYF

SEQ ID NO: 788737 - protein, 14 aa, Homo sapiens
  CDR3 for alpha chain variable domain of TCR clone 394369 (TRAV1-2, TRAJ6)
CAGQASGGSYIPTF

SEQ ID NO: 788738 - protein, 17 aa, Homo sapiens
  CDR3 for beta chain variable domain of TCR clone 394369 (TRBV11-2, TRBJ2-1)
CASSLYPPGVEYNEQFF

SEQ ID NO: 788739 - protein, 13 aa, Homo sapiens
  CDR3 for alpha chain variable domain of TCR clone 394370 (TRAV8-3, TRAJ30)
CAVGGWRDDKIIF

SEQ ID NO: 788740 - protein, 14 aa, Homo sapiens
  CDR3 for beta chain variable domain of TCR clone 394370 (TRBV20-1, TRBJ1-1)
CSAPPADMNTEAFY

SEQ ID NO: 788741 - protein, 16 aa, Homo sapiens
  CDR3 for alpha chain variable domain of TCR clone 394371 (TRAV30, TRAJ49)
SAAQRVGPNTGNQFYF

SEQ ID NO: 788742 - protein, 16 aa, Homo sapiens
  CDR3 for beta chain variable domain of TCR clone 394371 (TRBV2, TRBJ2-3)
CASSTSVEGVTDTQYF

SEQ ID NO: 788743 - protein, 13 aa, Homo sapiens
  CDR3 for alpha chain variable domain of TCR clone 394372 (TRAV12-3, TRAJ7)
CAMSASGNNRLAF

SEQ ID NO: 788744 - protein, 14 aa, Homo sapiens
  CDR3 for beta chain variable domain of TCR clone 394372 (TRBV10-3, TRBJ1-2)
CAISAGGRVDGYTF

SEQ ID NO: 788745 - protein, 12 aa, Homo sapiens
  CDR3 for alpha chain variable domain of TCR clone 394373 (TRAV35, TRAJ30)
CAGLNRDDKIIL

SEQ ID NO: 788746 - protein, 15 aa, Homo sapiens
  CDR3 for beta chain variable domain of TCR clone 394373 (TRBV18, TRBJ2-3)
CASSPLAGETDTQYF

SEQ ID NO: 788747 - protein, 16 aa, Homo sapiens
  CDR3 for alpha chain variable domain of TCR clone 394374 (TRAV30, TRAJ24)
CGTEIVDADSWGKFQF

SEQ ID NO: 788748 - protein, 16 aa, Homo sapiens
  CDR3 for beta chain variable domain of TCR clone 394374 (TRBV6-6, TRBJ2-3)
CASSYSHAGSTDTQYF

SEQ ID NO: 788749 - protein, 14 aa, Homo sapiens
  CDR3 for alpha chain variable domain of TCR clone 394375 (TRAV14/DV4, TRAJ15)
GAMRRDQAGTALIF

SEQ ID NO: 788750 - protein, 16 aa, Homo sapiens
  CDR3 for beta chain variable domain of TCR clone 394375 (TRBV15, TRBJ2-3)
CATSRDLGIVTDTQYF

SEQ ID NO: 788751 - protein, 12 aa, Homo sapiens
  CDR3 for alpha chain variable domain of TCR clone 394376 (TRAV26-1, TRAJ17)
CIVRSAGNKLTF

SEQ ID NO: 788752 - protein, 15 aa, Homo sapiens
  CDR3 for beta chain variable domain of TCR clone 394376 (TRBV7-6, TRBJ1-2)
CDSSSGGRGGYGDTF

SEQ ID NO: 788753 - protein, 15 aa, Homo sapiens
  CDR3 for alpha chain variable domain of TCR clone 394377 (TRAV2, TRAJ15)
CAVEDREQAGTALIF

SEQ ID NO: 788754 - protein, 13 aa, Homo sapiens
  CDR3 for beta chain variable domain of TCR clone 394377 (TRBV10-2, TRBJ2-7)
CASGTSGGYDQYF

SEQ ID NO: 788755 - protein, 14 aa, Homo sapiens
  CDR3 for alpha chain variable domain of TCR clone 394378 (TRAV35, TRAJ22)
CAGVRPGSARQLTF

SEQ ID NO: 788756 - protein, 13 aa, Homo sapiens
  CDR3 for beta chain variable domain of TCR clone 394378 (TRBV20-1, TRBJ2-7)
CSATHTSGYEQYF

SEQ ID NO: 788757 - protein, 13 aa, Homo sapiens
  CDR3 for alpha chain variable domain of TCR clone 394379 (TRAV22, TRAJ29)
RAVGGSGNTPLVF

SEQ ID NO: 788758 - protein, 13 aa, Homo sapiens
  CDR3 for beta chain variable domain of TCR clone 394379 (TRBV19, TRBJ2-7)
CASRKAGGSEQYF

SEQ ID NO: 788759 - protein, 13 aa, Homo sapiens
  CDR3 for alpha chain variable domain of TCR clone 394380 (TRAV8-6, TRAJ16)
CAVSSPDGQKLLF

SEQ ID NO: 788760 - protein, 17 aa, Homo sapiens
  CDR3 for beta chain variable domain of TCR clone 394380 (TRBV24-1, TRBJ2-1)
CATSDVSTSGTYNEQFF

SEQ ID NO: 788761 - protein, 12 aa, Homo sapiens
  CDR3 for alpha chain variable domain of TCR clone 394381 (TRAV8-3, TRAJ26)
CAGDNYGQNFGF

SEQ ID NO: 788762 - protein, 16 aa, Homo sapiens
  CDR3 for beta chain variable domain of TCR clone 394381 (TRBV20-1, TRBJ1-4)
CSAPGQGLLTNEKLFF

SEQ ID NO: 788763 - protein, 16 aa, Homo sapiens
  CDR3 for alpha chain variable domain of TCR clone 394382 (TRAV30, TRAJ24)
CGTEIVDADSWGKFQF

SEQ ID NO: 788764 - protein, 13 aa, Homo sapiens
  CDR3 for beta chain variable domain of TCR clone 394382 (TRBV18, TRBJ1-2)
CASSASATEGCTF

SEQ ID NO: 788765 - protein, 17 aa, Homo sapiens
  CDR3 for alpha chain variable domain of TCR clone 394383 (TRAV3, TRAJ57)
CAVRDGPRAGGSYIPTF

SEQ ID NO: 788766 - protein, 11 aa, Homo sapiens
  CDR3 for beta chain variable domain of TCR clone 394383 (TRBV11-2, TRBJ1-1)
CASSINTEAFF

SEQ ID NO: 788767 - protein, 12 aa, Homo sapiens
  CDR3 for alpha chain variable domain of TCR clone 394384 (TRAV35, TRAJ31)
CAAASNNAGLMF

SEQ ID NO: 788768 - protein, 14 aa, Homo sapiens
  CDR3 for beta chain variable domain of TCR clone 394384 (TRBV2, TRBJ2-2)
CASSLFGGNGELFF

SEQ ID NO: 788769 - protein, 13 aa, Homo sapiens
  CDR3 for alpha chain variable domain of TCR clone 394385 (TRAV2, TRAJ13)
CAVESGGYQKVTF

SEQ ID NO: 788770 - protein, 13 aa, Homo sapiens
  CDR3 for beta chain variable domain of TCR clone 394385 (TRBV7-2, TRBJ1-1)
CASNLKGAKGAFF

SEQ ID NO: 788771 - protein, 15 aa, Homo sapiens
  CDR3 for alpha chain variable domain of TCR clone 394386 (TRAV36/DV7, TRAJ54)
CAVEKPVQGAQKLVF

SEQ ID NO: 788772 - protein, 15 aa, Homo sapiens
  CDR3 for beta chain variable domain of TCR clone 394386 (TRBV29-1, TRBJ2-7)
CSVEFFDRGSYEQYF

SEQ ID NO: 788773 - protein, 12 aa, Homo sapiens
  CDR3 for alpha chain variable domain of TCR clone 394387 (TRAV3, TRAJ20)
CAVRDSDYKLSF

SEQ ID NO: 788774 - protein, 13 aa, Homo sapiens
  CDR3 for beta chain variable domain of TCR clone 394387 (TRBV9, TRBJ2-1)
CASSVGQGGEQFF

SEQ ID NO: 788775 - protein, 13 aa, Homo sapiens
  CDR3 for alpha chain variable domain of TCR clone 394388 (TRAV21, TRAJ20)
CAVGLRVDYQLSF

SEQ ID NO: 788776 - protein, 15 aa, Homo sapiens
  CDR3 for beta chain variable domain of TCR clone 394388 (TRBV29-1, TRBJ2-1)
CSVPTGLALYNEQFF

SEQ ID NO: 788777 - protein, 10 aa, Homo sapiens
  CDR3 for alpha chain variable domain of TCR clone 394389 (TRAV21, TRAJ35)
CAVFGNVLHF

SEQ ID NO: 788778 - protein, 17 aa, Homo sapiens
  CDR3 for beta chain variable domain of TCR clone 394389 (TRBV7-2, TRBJ2-2)
CASSPRGAGEGTGELFF

SEQ ID NO: 788779 - protein, 16 aa, Homo sapiens
  CDR3 for alpha chain variable domain of TCR clone 394390 (TRAV12-3, TRAJ50)
CAMRDPMKTSHDKVIF

SEQ ID NO: 788780 - protein, 13 aa, Homo sapiens
  CDR3 for beta chain variable domain of TCR clone 394390 (TRBV4-1, TRBJ2-3)
CASSLDFTGTQYF

SEQ ID NO: 788781 - protein, 15 aa, Homo sapiens
  CDR3 for alpha chain variable domain of TCR clone 394391 (TRAV38-1, TRAJ45)
CAFMKGGGGADGLTF

SEQ ID NO: 788782 - protein, 13 aa, Homo sapiens
  CDR3 for beta chain variable domain of TCR clone 394391 (TRBV7-9, TRBJ1-2)
CASSLKQNYGDTF

SEQ ID NO: 788783 - protein, 15 aa, Homo sapiens
  CDR3 for alpha chain variable domain of TCR clone 394392 (TRAV3, TRAJ22)
CAVRDRGGSARQLTF

SEQ ID NO: 788784 - protein, 15 aa, Homo sapiens
  CDR3 for beta chain variable domain of TCR clone 394392 (TRBV19, TRBJ2-1)
CASSIVRGEGREQFF

SEQ ID NO: 788785 - protein, 14 aa, Homo sapiens
  CDR3 for alpha chain variable domain of TCR clone 394393 (TRAV9-2, TRAJ39)
CALYIYNAGNMLTF

SEQ ID NO: 788786 - protein, 15 aa, Homo sapiens
  CDR3 for beta chain variable domain of TCR clone 394393 (TRBV28, TRBJ1-2)
CASSLWQPTNYGYTF

SEQ ID NO: 788787 - protein, 10 aa, Homo sapiens
  CDR3 for alpha chain variable domain of TCR clone 394394 (TRAV3, TRAJ30)
CAVREIEIIF

SEQ ID NO: 788788 - protein, 12 aa, Homo sapiens
  CDR3 for beta chain variable domain of TCR clone 394394 (TRBV6-3, TRBJ2-1)
CASSGSYNEQFF

SEQ ID NO: 788789 - protein, 13 aa, Homo sapiens
  CDR3 for alpha chain variable domain of TCR clone 394395 (TRAV14/DV4, TRAJ16)
CAMRGTDGKKLLF

SEQ ID NO: 788790 - protein, 18 aa, Homo sapiens
  CDR3 for beta chain variable domain of TCR clone 394395 (TRBV4-1, TRBJ2-3)
CASSHQLAGGRSTDTQYF

SEQ ID NO: 788791 - protein, 12 aa, Homo sapiens
  CDR3 for alpha chain variable domain of TCR clone 394396 (TRAV13-1, TRAJ20)
SVQQVNDYELSF

SEQ ID NO: 788792 - protein, 14 aa, Homo sapiens
  CDR3 for beta chain variable domain of TCR clone 394396 (TRBV7-6, TRBJ2-3)
CASSLTGGTDTQYF

SEQ ID NO: 788793 - protein, 11 aa, Homo sapiens
  CDR3 for alpha chain variable domain of TCR clone 394397 (TRAV12-2, TRAJ36)
CTVDGANNLFF

SEQ ID NO: 788794 - protein, 13 aa, Homo sapiens
  CDR3 for beta chain variable domain of TCR clone 394397 (TRBV28, TRBJ2-5)
CAGVSRGEETQYF

SEQ ID NO: 788795 - protein, 18 aa, Homo sapiens
  CDR3 for alpha chain variable domain of TCR clone 394398 (TRAV29/DV5, TRAJ52)
CAAGFRGAGGTSHGKLTF

SEQ ID NO: 788796 - protein, 16 aa, Homo sapiens
  CDR3 for beta chain variable domain of TCR clone 394398 (TRBV7-3, TRBJ2-2)
CASSLKRGTLSGELFS

SEQ ID NO: 788797 - protein, 17 aa, Homo sapiens
  CDR3 for alpha chain variable domain of TCR clone 394399 (TRAV13-1, )
CAANIQNPDPAVYQLRD

SEQ ID NO: 788798 - protein, 14 aa, Homo sapiens
  CDR3 for beta chain variable domain of TCR clone 394399 (TRBV19, TRBJ2-7)
CASSIGSNSYEQYF

SEQ ID NO: 788799 - protein, 14 aa, Homo sapiens
  CDR3 for alpha chain variable domain of TCR clone 394400 (TRAV1-2, TRAJ8)
CAVREDTGFQKLVF

SEQ ID NO: 788800 - protein, 13 aa, Homo sapiens
  CDR3 for beta chain variable domain of TCR clone 394400 (TRBV7-3, TRBJ2-1)
CASSLDGYNEQFF

SEQ ID NO: 788801 - protein, 11 aa, Homo sapiens
  CDR3 for alpha chain variable domain of TCR clone 394401 (TRAV25, TRAJ31)
CRVNNNARLMF

SEQ ID NO: 788802 - protein, 15 aa, Homo sapiens
  CDR3 for beta chain variable domain of TCR clone 394401 (TRBV20-1, TRBJ2-7)
CSARDRVSGMDEQYF

SEQ ID NO: 788803 - protein, 18 aa, Homo sapiens
  CDR3 for alpha chain variable domain of TCR clone 394402 (TRAV12-3, TRAJ52)
CAMSVGGAGGTSYGKLTF

SEQ ID NO: 788804 - protein, 14 aa, Homo sapiens
  CDR3 for beta chain variable domain of TCR clone 394402 (TRBV4-1, TRBJ2-2)
CASSPAVNTGELFF

SEQ ID NO: 788805 - protein, 18 aa, Homo sapiens
  CDR3 for alpha chain variable domain of TCR clone 394403 (TRAV21, TRAJ52)
CAVRPSPAGGTSYGKLTF

SEQ ID NO: 788806 - protein, 17 aa, Homo sapiens
  CDR3 for beta chain variable domain of TCR clone 394403 (TRBV5-1, TRBJ2-5)
CASSPVALGQNQETQYF

SEQ ID NO: 788807 - protein, 14 aa, Homo sapiens
  CDR3 for alpha chain variable domain of TCR clone 394404 (TRAV12-3, TRAJ13)
CAMKNSGGYQKVTF

SEQ ID NO: 788808 - protein, 14 aa, Homo sapiens
  CDR3 for beta chain variable domain of TCR clone 394404 (TRBV7-3, TRBJ2-1)
CASSLAGGTNEQFF

SEQ ID NO: 788809 - protein, 14 aa, Homo sapiens
  CDR3 for alpha chain variable domain of TCR clone 394405 (TRAV29/DV5, TRAJ32)
CAAAYGGATNKLIC

SEQ ID NO: 788810 - protein, 14 aa, Homo sapiens
  CDR3 for beta chain variable domain of TCR clone 394405 (TRBV20-1, TRBJ1-1)
CSAQTRIGGTEAFF

SEQ ID NO: 788811 - protein, 12 aa, Homo sapiens
  CDR3 for alpha chain variable domain of TCR clone 394406 (TRAV27, TRAJ33)
CAGEDSNYQLIW

SEQ ID NO: 788812 - protein, 13 aa, Homo sapiens
  CDR3 for beta chain variable domain of TCR clone 394406 (TRBV10-3, TRBJ2-7)
CASKLAVNYEQYF

SEQ ID NO: 788813 - protein, 14 aa, Homo sapiens
  CDR3 for alpha chain variable domain of TCR clone 394407 (TRAV8-3, TRAJ39)
CAVGAWVAGNMLTF

SEQ ID NO: 788814 - protein, 16 aa, Homo sapiens
  CDR3 for beta chain variable domain of TCR clone 394407 (TRBV7-2, TRBJ1-3)
CASSSGRVLSGNTIYF

SEQ ID NO: 788815 - protein, 15 aa, Homo sapiens
  CDR3 for alpha chain variable domain of TCR clone 394408 (TRAV13-1, TRAJ17)
CAASIERAAGNKLTF

SEQ ID NO: 788816 - protein, 14 aa, Homo sapiens
  CDR3 for beta chain variable domain of TCR clone 394408 (TRBV4-1, TRBJ2-2)
CASSQAVNIGELFF

SEQ ID NO: 788817 - protein, 15 aa, Homo sapiens
  CDR3 for alpha chain variable domain of TCR clone 394409 (TRAV26-1, TRAJ29)
CIVRVEGSGNTPLVC

SEQ ID NO: 788818 - protein, 15 aa, Homo sapiens
  CDR3 for beta chain variable domain of TCR clone 394409 (TRBV7-9, TRBJ1-5)
CASSQGHQPNQAQHF

SEQ ID NO: 788819 - protein, 13 aa, Homo sapiens
  CDR3 for alpha chain variable domain of TCR clone 394410 (TRAV1-2, TRAJ9)
CAALNTGGFKTIF

SEQ ID NO: 788820 - protein, 13 aa, Homo sapiens
  CDR3 for beta chain variable domain of TCR clone 394410 (TRBV19, TRBJ1-2)
CASSVPGQDGQTF

SEQ ID NO: 788821 - protein, 14 aa, Homo sapiens
  CDR3 for alpha chain variable domain of TCR clone 394411 (TRAV12-3, TRAJ12)
CAMSALDSSYKLIF

SEQ ID NO: 788822 - protein, 16 aa, Homo sapiens
  CDR3 for beta chain variable domain of TCR clone 394411 (TRBV7-9, TRBJ2-3)
CASSLQGNPGKDTQYF

SEQ ID NO: 788823 - protein, 13 aa, Homo sapiens
  CDR3 for alpha chain variable domain of TCR clone 394412 (TRAV6, TRAJ33)
CAPPMDSNYQLIW

SEQ ID NO: 788824 - protein, 13 aa, Homo sapiens
  CDR3 for beta chain variable domain of TCR clone 394412 (TRBV7-7, TRBJ2-2)
CASSLTSAGELFF

SEQ ID NO: 788825 - protein, 12 aa, Homo sapiens
  CDR3 for alpha chain variable domain of TCR clone 394413 (TRAV1-1, TRAJ9)
CAVDTGGFKTIF

SEQ ID NO: 788826 - protein, 15 aa, Homo sapiens
  CDR3 for beta chain variable domain of TCR clone 394413 (TRBV7-2, TRBJ2-1)
CASTHGTGIYNEQFF

SEQ ID NO: 788827 - protein, 13 aa, Homo sapiens
  CDR3 for alpha chain variable domain of TCR clone 394414 (TRAV27, TRAJ49)
CAPRPYTGNQFYF

SEQ ID NO: 788828 - protein, 16 aa, Homo sapiens
  CDR3 for beta chain variable domain of TCR clone 394414 (TRBV4-1, TRBJ1-2)
CASSHDAGQVLYGDTF

SEQ ID NO: 788829 - protein, 14 aa, Homo sapiens
  CDR3 for alpha chain variable domain of TCR clone 394415 (TRAV10, TRAJ47)
CVVGLMEYGNKLVF

SEQ ID NO: 788830 - protein, 16 aa, Homo sapiens
  CDR3 for beta chain variable domain of TCR clone 394415 (TRBV28, TRBJ2-3)
CASSLFTGVSTDTQYF

SEQ ID NO: 788831 - protein, 14 aa, Homo sapiens
  CDR3 for alpha chain variable domain of TCR clone 394416 (TRAV1-2, TRAJ16)
CAVNRFSDGQKPLL

SEQ ID NO: 788832 - protein, 11 aa, Homo sapiens
  CDR3 for beta chain variable domain of TCR clone 394416 (TRBV29-1, TRBJ2-5)
CSEDRTGTQYF

SEQ ID NO: 788833 - protein, 17 aa, Homo sapiens
  CDR3 for alpha chain variable domain of TCR clone 394417 (TRAV13-1, TRAJ28)
CAASPPYSGAGSYQLTF

SEQ ID NO: 788834 - protein, 15 aa, Homo sapiens
  CDR3 for beta chain variable domain of TCR clone 394417 (TRBV6-3, TRBJ2-2)
CASSSLATLTGELFF

SEQ ID NO: 788835 - protein, 11 aa, Homo sapiens
  CDR3 for alpha chain variable domain of TCR clone 394418 (TRAV21, TRAJ34)
SAVTNTDKLIF

SEQ ID NO: 788836 - protein, 15 aa, Homo sapiens
  CDR3 for beta chain variable domain of TCR clone 394418 (TRBV7-2, TRBJ2-7)
CASSLTGQGTYEQYF

SEQ ID NO: 788837 - protein, 13 aa, Homo sapiens
  CDR3 for alpha chain variable domain of TCR clone 394419 (TRAV8-3, TRAJ48)
CAGVPFGNEKLTV

SEQ ID NO: 788838 - protein, 15 aa, Homo sapiens
  CDR3 for beta chain variable domain of TCR clone 394419 (TRBV11-2, TRBJ2-1)
CASSSPSTRYNEQFF

SEQ ID NO: 788839 - protein, 13 aa, Homo sapiens
  CDR3 for alpha chain variable domain of TCR clone 394420 (TRAV8-1, TRAJ23)
CAVTGGQGGKLIF

SEQ ID NO: 788840 - protein, 14 aa, Homo sapiens
  CDR3 for beta chain variable domain of TCR clone 394420 (TRBV12-5, TRBJ2-5)
CASGSRTHQETQYF

SEQ ID NO: 788841 - protein, 17 aa, Homo sapiens
  CDR3 for alpha chain variable domain of TCR clone 394421 (TRAV3, TRAJ6)
CAVRDGPREGGSYIPTC

SEQ ID NO: 788842 - protein, 14 aa, Homo sapiens
  CDR3 for beta chain variable domain of TCR clone 394421 (TRBV7-2, TRBJ2-7)
CASSPKTSFYEQYF

SEQ ID NO: 788843 - protein, 15 aa, Homo sapiens
  CDR3 for alpha chain variable domain of TCR clone 394422 (TRAV2, TRAJ9)
CAVEDRGTGGFKTVF

SEQ ID NO: 788844 - protein, 16 aa, Homo sapiens
  CDR3 for beta chain variable domain of TCR clone 394422 (TRBV5-1, TRBJ1-1)
CASSSGGNSLNTEAFF

SEQ ID NO: 788845 - protein, 13 aa, Homo sapiens
  CDR3 for alpha chain variable domain of TCR clone 394423 (TRAV10, TRAJ43)
CVVSATNNNDMRF

SEQ ID NO: 788846 - protein, 13 aa, Homo sapiens
  CDR3 for beta chain variable domain of TCR clone 394423 (TRBV7-6, TRBJ2-1)
CQQLGGGADEQFF

SEQ ID NO: 788847 - protein, 13 aa, Homo sapiens
  CDR3 for alpha chain variable domain of TCR clone 394424 (TRAV1-2, TRAJ9)
CAALNTGGFKTIL

SEQ ID NO: 788848 - protein, 13 aa, Homo sapiens
  CDR3 for beta chain variable domain of TCR clone 394424 (TRBV19, TRBJ1-2)
CASSVPGQDGYAF

SEQ ID NO: 788849 - protein, 12 aa, Homo sapiens
  CDR3 for alpha chain variable domain of TCR clone 394425 (TRAV12-1, TRAJ40)
CVVPSGTYKYIF

SEQ ID NO: 788850 - protein, 13 aa, Homo sapiens
  CDR3 for beta chain variable domain of TCR clone 394425 (TRBV7-9, TRBJ1-2)
CASSLKQNYGYTF

SEQ ID NO: 788851 - protein, 13 aa, Homo sapiens
  CDR3 for alpha chain variable domain of TCR clone 394426 (TRAV17, TRAJ13)
CATDSGGYQKVTF

SEQ ID NO: 788852 - protein, 13 aa, Homo sapiens
  CDR3 for beta chain variable domain of TCR clone 394426 (TRBV2, TRBJ1-4)
CASSERAGEKLFF

SEQ ID NO: 788853 - protein, 12 aa, Homo sapiens
  CDR3 for alpha chain variable domain of TCR clone 394427 (TRAV3, TRAJ26)
CAVRDYGQNFVF

SEQ ID NO: 788854 - protein, 16 aa, Homo sapiens
  CDR3 for beta chain variable domain of TCR clone 394427 (TRBV19, TRBJ2-3)
CASSPGAASRTDTQYF

SEQ ID NO: 788855 - protein, 15 aa, Homo sapiens
  CDR3 for alpha chain variable domain of TCR clone 394428 (TRAV2, TRAJ24)
CAVVRLKDSWGQLQF

SEQ ID NO: 788856 - protein, 16 aa, Homo sapiens
  CDR3 for beta chain variable domain of TCR clone 394428 (TRBV7-7, TRBJ2-3)
CASSPGTSGSTDTQYF

SEQ ID NO: 788857 - protein, 17 aa, Homo sapiens
  CDR3 for alpha chain variable domain of TCR clone 394429 (TRAV35, TRAJ38)
CAGQLQRNAGNNRKLIW

SEQ ID NO: 788858 - protein, 13 aa, Homo sapiens
  CDR3 for beta chain variable domain of TCR clone 394429 (TRBV12-4, TRBJ1-2)
CASSLRQGKGYTF

SEQ ID NO: 788859 - protein, 14 aa, Homo sapiens
  CDR3 for alpha chain variable domain of TCR clone 394430 (TRAV3, TRAJ6)
CAVRDPWGSYIPTF

SEQ ID NO: 788860 - protein, 17 aa, Homo sapiens
  CDR3 for beta chain variable domain of TCR clone 394430 (TRBV11-2, TRBJ2-6)
CASSQRDIFSGANVLTF

SEQ ID NO: 788861 - protein, 12 aa, Homo sapiens
  CDR3 for alpha chain variable domain of TCR clone 394431 (TRAV13-1, TRAJ21)
CAAKEGFNKFYF

SEQ ID NO: 788862 - protein, 14 aa, Homo sapiens
  CDR3 for beta chain variable domain of TCR clone 394431 (TRBV20-1, TRBJ2-1)
CSPNDEASYNEQFF

SEQ ID NO: 788863 - protein, 12 aa, Homo sapiens
  CDR3 for alpha chain variable domain of TCR clone 394432 (TRAV12-3, TRAJ17)
CAMTLTGNKLTF

SEQ ID NO: 788864 - protein, 12 aa, Homo sapiens
  CDR3 for beta chain variable domain of TCR clone 394432 (TRBV11-2, TRBJ2-7)
CASSLLTYEQYF

SEQ ID NO: 788865 - protein, 14 aa, Homo sapiens
  CDR3 for alpha chain variable domain of TCR clone 394433 (TRAV1-2, TRAJ15)
CAVRDRPAGTALIF

SEQ ID NO: 788866 - protein, 17 aa, Homo sapiens
  CDR3 for beta chain variable domain of TCR clone 394433 (TRBV5-5, TRBJ1-2)
CASSLGSLDGQSEGYTF

SEQ ID NO: 788867 - protein, 13 aa, Homo sapiens
  CDR3 for alpha chain variable domain of TCR clone 394434 (TRAV8-6, TRAJ41)
CAVSENSGYALNF

SEQ ID NO: 788868 - protein, 14 aa, Homo sapiens
  CDR3 for beta chain variable domain of TCR clone 394434 (TRBV25-1, TRBJ1-1)
CASTHLGGNTEAFF

SEQ ID NO: 788869 - protein, 15 aa, Homo sapiens
  CDR3 for alpha chain variable domain of TCR clone 394435 (TRAV12-2, TRAJ56)
CAVNPFTVANSKLTF

SEQ ID NO: 788870 - protein, 13 aa, Homo sapiens
  CDR3 for beta chain variable domain of TCR clone 394435 (TRBV20-1, TRBJ1-2)
CSARDRVHGGYTF

SEQ ID NO: 788871 - protein, 14 aa, Homo sapiens
  CDR3 for alpha chain variable domain of TCR clone 394436 (TRAV8-3, TRAJ4)
CAVGAAGGYNKLIF

SEQ ID NO: 788872 - protein, 14 aa, Homo sapiens
  CDR3 for beta chain variable domain of TCR clone 394436 (TRBV18, TRBJ2-5)
CASSPGVSQETQYF

SEQ ID NO: 788873 - protein, 15 aa, Homo sapiens
  CDR3 for alpha chain variable domain of TCR clone 394437 (TRAV26-1, TRAJ22)
SIVRVSFWFCKATDL

SEQ ID NO: 788874 - protein, 13 aa, Homo sapiens
  CDR3 for beta chain variable domain of TCR clone 394437 (TRBV7-9, TRBJ1-2)
CASSLKQNYGYTF

SEQ ID NO: 788875 - protein, 12 aa, Homo sapiens
  CDR3 for alpha chain variable domain of TCR clone 394438 (TRAV2, TRAJ9)
CAVGAGGVKTIF

SEQ ID NO: 788876 - protein, 16 aa, Homo sapiens
  CDR3 for beta chain variable domain of TCR clone 394438 (TRBV13, TRBJ2-2)
CASSPTTGEHTGELFF

SEQ ID NO: 788877 - protein, 14 aa, Homo sapiens
  CDR3 for alpha chain variable domain of TCR clone 394439 (TRAV13-1, TRAJ35)
CAASKGGFGNVLHC

SEQ ID NO: 788878 - protein, 13 aa, Homo sapiens
  CDR3 for beta chain variable domain of TCR clone 394439 (TRBV7-3, TRBJ1-1)
CASSLDWGAEAFF

SEQ ID NO: 788879 - protein, 12 aa, Homo sapiens
  CDR3 for alpha chain variable domain of TCR clone 394440 (TRAV27, TRAJ52)
QAGGTSYGKLTF

SEQ ID NO: 788880 - protein, 14 aa, Homo sapiens
  CDR3 for beta chain variable domain of TCR clone 394440 (TRBV7-6, TRBJ2-3)
CASSLGTVTDTQYF

SEQ ID NO: 788881 - protein, 13 aa, Homo sapiens
  CDR3 for alpha chain variable domain of TCR clone 394441 (TRAV12-3, TRAJ13)
CAMTSGGYQKVTF

SEQ ID NO: 788882 - protein, 13 aa, Homo sapiens
  CDR3 for beta chain variable domain of TCR clone 394441 (TRBV7-9, TRBJ1-2)
CASSLKQNYGYTV

SEQ ID NO: 788883 - protein, 14 aa, Homo sapiens
  CDR3 for alpha chain variable domain of TCR clone 394442 (TRAV38-1, TRAJ43)
CAFTKHNNNNDMRF

SEQ ID NO: 788884 - protein, 17 aa, Homo sapiens
  CDR3 for beta chain variable domain of TCR clone 394442 (TRBV7-7, TRBJ1-4)
CASSLVGQGASNEKLFF

SEQ ID NO: 788885 - protein, 15 aa, Homo sapiens
  CDR3 for alpha chain variable domain of TCR clone 394443 (TRAV29/DV5, TRAJ24)
CAASGATDSWGKFQF

SEQ ID NO: 788886 - protein, 12 aa, Homo sapiens
  CDR3 for beta chain variable domain of TCR clone 394443 (TRBV11-2, TRBJ2-2)
CAGSLPTGELFF

SEQ ID NO: 788887 - protein, 14 aa, Homo sapiens
  CDR3 for alpha chain variable domain of TCR clone 394444 (TRAV3, TRAJ21)
CAVRDKYNFNQFYF

SEQ ID NO: 788888 - protein, 14 aa, Homo sapiens
  CDR3 for beta chain variable domain of TCR clone 394444 (TRBV27, TRBJ2-3)
CASRDSTITDTQYF

SEQ ID NO: 788889 - protein, 14 aa, Homo sapiens
  CDR3 for alpha chain variable domain of TCR clone 394445 (TRAV12-2, TRAJ13)
CAVKQTGGYQKVTF

SEQ ID NO: 788890 - protein, 16 aa, Homo sapiens
  CDR3 for beta chain variable domain of TCR clone 394445 (TRBV12-5, TRBJ2-5)
CASGPRTSGNQETQYF

SEQ ID NO: 788891 - protein, 15 aa, Homo sapiens
  CDR3 for alpha chain variable domain of TCR clone 394446 (TRAV3, TRAJ5)
CAVRALDTGRRALTF

SEQ ID NO: 788892 - protein, 14 aa, Homo sapiens
  CDR3 for beta chain variable domain of TCR clone 394446 (TRBV25-1, TRBJ1-1)
CASTHLGGNTEAFF

SEQ ID NO: 788893 - protein, 14 aa, Homo sapiens
  CDR3 for alpha chain variable domain of TCR clone 394447 (TRAV1-1, TRAJ30)
CAVRSLNRADKIIF

SEQ ID NO: 788894 - protein, 15 aa, Homo sapiens
  CDR3 for beta chain variable domain of TCR clone 394447 (TRBV27, TRBJ1-4)
CASSAQQDLNEKLFF

SEQ ID NO: 788895 - protein, 14 aa, Homo sapiens
  CDR3 for alpha chain variable domain of TCR clone 394448 (TRAV20, TRAJ44)
CAVQDTGTASKLTF

SEQ ID NO: 788896 - protein, 13 aa, Homo sapiens
  CDR3 for beta chain variable domain of TCR clone 394448 (TRBV29-1, TRBJ1-3)
CSVGAGRGNTIYF

SEQ ID NO: 788897 - protein, 14 aa, Homo sapiens
  CDR3 for alpha chain variable domain of TCR clone 394449 (TRAV12-3, TRAJ10)
SHLPLTGGGNKLTF

SEQ ID NO: 788898 - protein, 15 aa, Homo sapiens
  CDR3 for beta chain variable domain of TCR clone 394449 (TRBV19, TRBJ2-1)
CASSTGTSSYNEQFF

SEQ ID NO: 788899 - protein, 14 aa, Homo sapiens
  CDR3 for alpha chain variable domain of TCR clone 394450 (TRAV12-3, TRAJ10)
SHLPLTGGGNKLTF

SEQ ID NO: 788900 - protein, 12 aa, Homo sapiens
  CDR3 for beta chain variable domain of TCR clone 394450 (TRBV14, TRBJ2-7)
CASSRLKGEQYF

SEQ ID NO: 788901 - protein, 13 aa, Homo sapiens
  CDR3 for alpha chain variable domain of TCR clone 394451 (TRAV20, TRAJ37)
CAGCSSNTGKLIF

SEQ ID NO: 788902 - protein, 17 aa, Homo sapiens
  CDR3 for beta chain variable domain of TCR clone 394451 (TRBV27, TRBJ2-7)
CASSISPTGLHPTEQYF

SEQ ID NO: 788903 - protein, 14 aa, Homo sapiens
  CDR3 for alpha chain variable domain of TCR clone 394452 (TRAV1-2, TRAJ16)
CAVNRFSDGQKLPF

SEQ ID NO: 788904 - protein, 12 aa, Homo sapiens
  CDR3 for beta chain variable domain of TCR clone 394452 (TRBV7-2, TRBJ2-5)
CASSQYQETQYF

SEQ ID NO: 788905 - protein, 15 aa, Homo sapiens
  CDR3 for alpha chain variable domain of TCR clone 394453 (TRAV13-1, TRAJ17)
CAASIERAAGNKLTF

SEQ ID NO: 788906 - protein, 12 aa, Homo sapiens
  CDR3 for beta chain variable domain of TCR clone 394453 (TRBV6-1, TRBJ2-7)
CASSDYSYEQYF

SEQ ID NO: 788907 - protein, 14 aa, Homo sapiens
  CDR3 for alpha chain variable domain of TCR clone 394454 (TRAV12-2, TRAJ13)
YAVKKTGGDQKVTF

SEQ ID NO: 788908 - protein, 15 aa, Homo sapiens
  CDR3 for beta chain variable domain of TCR clone 394454 (TRBV27, TRBJ2-1)
CASSNGGGSSNEQFF

SEQ ID NO: 788909 - protein, 14 aa, Homo sapiens
  CDR3 for alpha chain variable domain of TCR clone 394455 (TRAV12-3, TRAJ5)
CAMTWDTGRRARTF

SEQ ID NO: 788910 - protein, 14 aa, Homo sapiens
  CDR3 for beta chain variable domain of TCR clone 394455 (TRBV10-2, TRBJ1-5)
CASSSTGRNQPQHF

SEQ ID NO: 788911 - protein, 12 aa, Homo sapiens
  CDR3 for alpha chain variable domain of TCR clone 394456 (TRAV16, TRAJ9)
CALRAGSFKTIF

SEQ ID NO: 788912 - protein, 13 aa, Homo sapiens
  CDR3 for beta chain variable domain of TCR clone 394456 (TRBV4-3, TRBJ1-1)
CASSQVEGSMAFF

SEQ ID NO: 788913 - protein, 14 aa, Homo sapiens
  CDR3 for alpha chain variable domain of TCR clone 394457 (TRAV1-2, TRAJ8)
CAVREDTGFQKLVF

SEQ ID NO: 788914 - protein, 17 aa, Homo sapiens
  CDR3 for beta chain variable domain of TCR clone 394457 (TRBV11-2, TRBJ2-1)
CAGSLYPPGVEYNEQFF

SEQ ID NO: 788915 - protein, 17 aa, Homo sapiens
  CDR3 for alpha chain variable domain of TCR clone 394458 (TRAV3, TRAJ42)
CAVRDRDYGGSQGNLIF

SEQ ID NO: 788916 - protein, 17 aa, Homo sapiens
  CDR3 for beta chain variable domain of TCR clone 394458 (TRBV7-9, TRBJ2-3)
CASNPTVAGDLPDTQYF

SEQ ID NO: 788917 - protein, 11 aa, Homo sapiens
  CDR3 for alpha chain variable domain of TCR clone 394459 (TRAV17, TRAJ36)
RAPTGANNLFF

SEQ ID NO: 788918 - protein, 12 aa, Homo sapiens
  CDR3 for beta chain variable domain of TCR clone 394459 (TRBV29-1, TRBJ2-3)
CSVTGGADTQYF

SEQ ID NO: 788919 - protein, 14 aa, Homo sapiens
  CDR3 for alpha chain variable domain of TCR clone 394460 (TRAV2, TRAJ9)
CAVEDPSGGFKTIF

SEQ ID NO: 788920 - protein, 15 aa, Homo sapiens
  CDR3 for beta chain variable domain of TCR clone 394460 (TRBV19, TRBJ2-1)
CASSIQATSYNEQFF

SEQ ID NO: 788921 - protein, 13 aa, Homo sapiens
  CDR3 for alpha chain variable domain of TCR clone 394461 (TRAV27, TRAJ29)
CAGAHSGNPPLVF

SEQ ID NO: 788922 - protein, 22 aa, Homo sapiens
  CDR3 for beta chain variable domain of TCR clone 394461 (TRBV7-9, TRBJ2-7)
RGTRPCISVPAALDRGAGEQYF

SEQ ID NO: 788923 - protein, 13 aa, Homo sapiens
  CDR3 for alpha chain variable domain of TCR clone 394462 (TRAV2, TRAJ40)
CAVVTSGTYKYIF

SEQ ID NO: 788924 - protein, 14 aa, Homo sapiens
  CDR3 for beta chain variable domain of TCR clone 394462 (TRBV19, TRBJ2-1)
CASPTFAVSGEQFF

SEQ ID NO: 788925 - protein, 14 aa, Homo sapiens
  CDR3 for alpha chain variable domain of TCR clone 394463 (TRAV27, TRAJ15)
CAGFDNQAGTALTF

SEQ ID NO: 788926 - protein, 11 aa, Homo sapiens
  CDR3 for beta chain variable domain of TCR clone 394463 (TRBV29-1, TRBJ1-1)
CSVEVGTRTFY

SEQ ID NO: 788927 - protein, 14 aa, Homo sapiens
  CDR3 for alpha chain variable domain of TCR clone 394464 (TRAV2, TRAJ20)
CAVDLRKHDYKLSF

SEQ ID NO: 788928 - protein, 12 aa, Homo sapiens
  CDR3 for beta chain variable domain of TCR clone 394464 (TRBV11-2, TRBJ2-1)
CASSPGNNEQFF

SEQ ID NO: 788929 - protein, 15 aa, Homo sapiens
  CDR3 for alpha chain variable domain of TCR clone 394465 (TRAV29/DV5, TRAJ40)
CAASAQGSGTYKYIF

SEQ ID NO: 788930 - protein, 15 aa, Homo sapiens
  CDR3 for beta chain variable domain of TCR clone 394465 (TRBV7-2, TRBJ2-3)
CASSLAGAFIDTQYL

SEQ ID NO: 788931 - protein, 10 aa, Homo sapiens
  CDR3 for alpha chain variable domain of TCR clone 394466 (TRAV12-2, TRAJ43)
CAAQVLSMRF

SEQ ID NO: 788932 - protein, 14 aa, Homo sapiens
  CDR3 for beta chain variable domain of TCR clone 394466 (TRBV11-2, TRBJ2-7)
CASSLGNSLYEQYF

SEQ ID NO: 788933 - protein, 13 aa, Homo sapiens
  CDR3 for alpha chain variable domain of TCR clone 394467 (TRAV13-1, TRAJ39)
CSASIVMQATCSP

SEQ ID NO: 788934 - protein, 19 aa, Homo sapiens
  CDR3 for beta chain variable domain of TCR clone 394467 (TRBV7-3, TRBJ2-7)
CASSLTGVAGGWPSYEQYF

SEQ ID NO: 788935 - protein, 14 aa, Homo sapiens
  CDR3 for alpha chain variable domain of TCR clone 394468 (TRAV8-1, TRAJ5)
CAVRTDTGRRALTF

SEQ ID NO: 788936 - protein, 13 aa, Homo sapiens
  CDR3 for beta chain variable domain of TCR clone 394468 (TRBV4-1, TRBJ2-1)
CASSQAGGDEQFF

SEQ ID NO: 788937 - protein, 16 aa, Homo sapiens
  CDR3 for alpha chain variable domain of TCR clone 394469 (TRAV30, TRAJ24)
CGTEIVDADSWGKFQF

SEQ ID NO: 788938 - protein, 11 aa, Homo sapiens
  CDR3 for beta chain variable domain of TCR clone 394469 (TRBV12-4, TRBJ1-2)
CASRGDRGYTF

SEQ ID NO: 788939 - protein, 14 aa, Homo sapiens
  CDR3 for alpha chain variable domain of TCR clone 394470 (TRAV8-4, TRAJ48)
CAVSETFGNEKLTF

SEQ ID NO: 788940 - protein, 16 aa, Homo sapiens
  CDR3 for beta chain variable domain of TCR clone 394470 (TRBV28, TRBJ2-1)
CASSSPEYPRDNEQFF

SEQ ID NO: 788941 - protein, 14 aa, Homo sapiens
  CDR3 for alpha chain variable domain of TCR clone 394471 (TRAV21, TRAJ45)
CAVSSGGGADGRTF

SEQ ID NO: 788942 - protein, 15 aa, Homo sapiens
  CDR3 for beta chain variable domain of TCR clone 394471 (TRBV6-1, TRBJ2-4)
CASSEAVWTINIQYF

SEQ ID NO: 788943 - protein, 13 aa, Homo sapiens
  CDR3 for alpha chain variable domain of TCR clone 394472 (TRAV21, TRAJ36)
CAVIKTGANNLFI

SEQ ID NO: 788944 - protein, 13 aa, Homo sapiens
  CDR3 for beta chain variable domain of TCR clone 394472 (TRBV29-1, TRBJ2-3)
CSATRGGRDTQYF

SEQ ID NO: 788945 - protein, 18 aa, Homo sapiens
  CDR3 for alpha chain variable domain of TCR clone 394473 (TRAV21, TRAJ52)
CAVRPSPAGGTSYGKLTF

SEQ ID NO: 788946 - protein, 11 aa, Homo sapiens
  CDR3 for beta chain variable domain of TCR clone 394473 (TRBV12-4, TRBJ2-3)
CASTATYTQYF

SEQ ID NO: 788947 - protein, 16 aa, Homo sapiens
  CDR3 for alpha chain variable domain of TCR clone 394474 (TRAV17, TRAJ28)
CACGSYSGAGSYQLTF

SEQ ID NO: 788948 - protein, 12 aa, Homo sapiens
  CDR3 for beta chain variable domain of TCR clone 394474 (TRBV11-2, TRBJ2-2)
CASSLGGGELFF

SEQ ID NO: 788949 - protein, 10 aa, Homo sapiens
  CDR3 for alpha chain variable domain of TCR clone 394475 (TRAV23/DV6, TRAJ31)
CARGGARLMF

SEQ ID NO: 788950 - protein, 15 aa, Homo sapiens
  CDR3 for beta chain variable domain of TCR clone 394475 (TRBV6-1, TRBJ1-3)
CASSESRAVGNTIYF

SEQ ID NO: 788951 - protein, 13 aa, Homo sapiens
  CDR3 for alpha chain variable domain of TCR clone 394476 (TRAV27, TRAJ53)
CAGQGGSNYKLRF

SEQ ID NO: 788952 - protein, 13 aa, Homo sapiens
  CDR3 for beta chain variable domain of TCR clone 394476 (TRBV29-1, TRBJ1-1)
CSVESGFGTEAFF

SEQ ID NO: 788953 - protein, 16 aa, Homo sapiens
  CDR3 for alpha chain variable domain of TCR clone 394477 (TRAV26-1, )
CIDIQNPDPAVYQLRD

SEQ ID NO: 788954 - protein, 19 aa, Homo sapiens
  CDR3 for beta chain variable domain of TCR clone 394477 (TRBV19, TRBJ2-5)
CASSIGQVTDFFLGEIQYF

SEQ ID NO: 788955 - protein, 10 aa, Homo sapiens
  CDR3 for alpha chain variable domain of TCR clone 394478 (TRAV23/DV6, TRAJ57)
CAASSTLSQG

SEQ ID NO: 788956 - protein, 15 aa, Homo sapiens
  CDR3 for beta chain variable domain of TCR clone 394478 (TRBV4-1, TRBJ2-7)
CASSQNTGRLYEQYF

SEQ ID NO: 788957 - protein, 14 aa, Homo sapiens
  CDR3 for alpha chain variable domain of TCR clone 394479 (TRAV8-4, TRAJ54)
CAVSEVLGAQKLVF

SEQ ID NO: 788958 - protein, 13 aa, Homo sapiens
  CDR3 for beta chain variable domain of TCR clone 394479 (TRBV27, TRBJ2-7)
CASRFVSSYEQYF

SEQ ID NO: 788959 - protein, 13 aa, Homo sapiens
  CDR3 for alpha chain variable domain of TCR clone 394480 (TRAV8-3, TRAJ28)
CAVGAVGSYQLPF

SEQ ID NO: 788960 - protein, 15 aa, Homo sapiens
  CDR3 for beta chain variable domain of TCR clone 394480 (TRBV7-9, TRBJ1-5)
CASSQGHQPNQPQHV

SEQ ID NO: 788961 - protein, 13 aa, Homo sapiens
  CDR3 for alpha chain variable domain of TCR clone 394481 (TRAV13-2, TRAJ13)
CAERPGVYQKVTF

SEQ ID NO: 788962 - protein, 15 aa, Homo sapiens
  CDR3 for beta chain variable domain of TCR clone 394481 (TRBV11-3, TRBJ2-7)
CASSPGQASSYEQYF

SEQ ID NO: 788963 - protein, 14 aa, Homo sapiens
  CDR3 for alpha chain variable domain of TCR clone 394482 (TRAV20, TRAJ22)
CAVQGAGSARQLTF

SEQ ID NO: 788964 - protein, 12 aa, Homo sapiens
  CDR3 for beta chain variable domain of TCR clone 394482 (TRBV7-8, TRBJ2-7)
CASSLGDREQYF

SEQ ID NO: 788965 - protein, 13 aa, Homo sapiens
  CDR3 for alpha chain variable domain of TCR clone 394483 (TRAV12-2, TRAJ20)
CAVYPSNDYKLSF

SEQ ID NO: 788966 - protein, 13 aa, Homo sapiens
  CDR3 for beta chain variable domain of TCR clone 394483 (TRBV4-1, TRBJ2-2)
CASSQENTGELFF

SEQ ID NO: 788967 - protein, 15 aa, Homo sapiens
  CDR3 for alpha chain variable domain of TCR clone 394484 (TRAV17, TRAJ10)
GATVLLTGGGNKLTF

SEQ ID NO: 788968 - protein, 16 aa, Homo sapiens
  CDR3 for beta chain variable domain of TCR clone 394484 (TRBV7-9, TRBJ2-3)
CASSPWREVGTDTQYF

SEQ ID NO: 788969 - protein, 15 aa, Homo sapiens
  CDR3 for alpha chain variable domain of TCR clone 394485 (TRAV8-4, TRAJ37)
CAVSRGSGNTGKLIF

SEQ ID NO: 788970 - protein, 14 aa, Homo sapiens
  CDR3 for beta chain variable domain of TCR clone 394485 (TRBV27, TRBJ2-1)
CAGSIAETYNEQFF

SEQ ID NO: 788971 - protein, 12 aa, Homo sapiens
  CDR3 for alpha chain variable domain of TCR clone 394486 (TRAV6, TRAJ30)
CAPEVRDDKIIF

SEQ ID NO: 788972 - protein, 13 aa, Homo sapiens
  CDR3 for beta chain variable domain of TCR clone 394486 (TRBV11-3, TRBJ2-1)
CASSSRRVDEQFF

SEQ ID NO: 788973 - protein, 18 aa, Homo sapiens
  CDR3 for alpha chain variable domain of TCR clone 394487 (TRAV21, TRAJ52)
CAVRPSPAGGTSYGKLTF

SEQ ID NO: 788974 - protein, 14 aa, Homo sapiens
  CDR3 for beta chain variable domain of TCR clone 394487 (TRBV7-3, TRBJ2-3)
CASSSTGVADTQYF

SEQ ID NO: 788975 - protein, 13 aa, Homo sapiens
  CDR3 for alpha chain variable domain of TCR clone 394488 (TRAV12-2, TRAJ37)
CAGGSGNTGKLIF

SEQ ID NO: 788976 - protein, 14 aa, Homo sapiens
  CDR3 for beta chain variable domain of TCR clone 394488 (TRBV18, TRBJ2-7)
CASSPRGGAYEQYF

SEQ ID NO: 788977 - protein, 14 aa, Homo sapiens
  CDR3 for alpha chain variable domain of TCR clone 394489 (TRAV12-2, TRAJ40)
CAVKIPSGTSNYIF

SEQ ID NO: 788978 - protein, 17 aa, Homo sapiens
  CDR3 for beta chain variable domain of TCR clone 394489 (TRBV7-8, TRBJ2-6)
CASSAGTGGAGANVLTF

SEQ ID NO: 788979 - protein, 18 aa, Homo sapiens
  CDR3 for alpha chain variable domain of TCR clone 394490 (TRAV8-3, TRAJ44)
CAVGALFKALPVNSPFGL

SEQ ID NO: 788980 - protein, 16 aa, Homo sapiens
  CDR3 for beta chain variable domain of TCR clone 394490 (TRBV11-2, TRBJ2-7)
CASSPTTGGVSYEQYF

SEQ ID NO: 788981 - protein, 12 aa, Homo sapiens
  CDR3 for alpha chain variable domain of TCR clone 394491 (TRAV1-1, TRAJ9)
CAGDTGGFKTIC

SEQ ID NO: 788982 - protein, 14 aa, Homo sapiens
  CDR3 for beta chain variable domain of TCR clone 394491 (TRBV7-8, TRBJ2-5)
CASSATGGQETQYF

SEQ ID NO: 788983 - protein, 18 aa, Homo sapiens
  CDR3 for alpha chain variable domain of TCR clone 394492 (TRAV12-3, TRAJ52)
CAMSRTNAGGTNYGKLTF

SEQ ID NO: 788984 - protein, 17 aa, Homo sapiens
  CDR3 for beta chain variable domain of TCR clone 394492 (TRBV7-3, TRBJ2-3)
CASSLMKWMRGADTQYF

SEQ ID NO: 788985 - protein, 15 aa, Homo sapiens
  CDR3 for alpha chain variable domain of TCR clone 394493 (TRAV26-1, TRAJ40)
CIDRYSTSGTYKYIF

SEQ ID NO: 788986 - protein, 11 aa, Homo sapiens
  CDR3 for beta chain variable domain of TCR clone 394493 (TRBV7-9, TRBJ2-1)
CASSSQNEQFF

SEQ ID NO: 788987 - protein, 14 aa, Homo sapiens
  CDR3 for alpha chain variable domain of TCR clone 394494 (TRAV17, TRAJ22)
CATIPSGSARQLTF

SEQ ID NO: 788988 - protein, 15 aa, Homo sapiens
  CDR3 for beta chain variable domain of TCR clone 394494 (TRBV6-3, TRBJ2-7)
CASSSPGTVFYEQYF

SEQ ID NO: 788989 - protein, 13 aa, Homo sapiens
  CDR3 for alpha chain variable domain of TCR clone 394495 (TRAV12-3, TRAJ13)
CAMSSGGYQKVTF

SEQ ID NO: 788990 - protein, 17 aa, Homo sapiens
  CDR3 for beta chain variable domain of TCR clone 394495 (TRBV4-1, TRBJ1-4)
FASSQEGPRGVEEKLFF

SEQ ID NO: 788991 - protein, 19 aa, Homo sapiens
  CDR3 for alpha chain variable domain of TCR clone 394496 (TRAV27, TRAJ49)
TAAQPGDTGLYPTSNQFYF

SEQ ID NO: 788992 - protein, 14 aa, Homo sapiens
  CDR3 for beta chain variable domain of TCR clone 394496 (TRBV9, TRBJ2-3)
CASSIDWGRDTQYF

SEQ ID NO: 788993 - protein, 14 aa, Homo sapiens
  CDR3 for alpha chain variable domain of TCR clone 394497 (TRAV26-1, TRAJ38)
CIADNAGNNRKLIW

SEQ ID NO: 788994 - protein, 17 aa, Homo sapiens
  CDR3 for beta chain variable domain of TCR clone 394497 (TRBV13, TRBJ2-3)
CASSLSRVAGGSNTQYF

SEQ ID NO: 788995 - protein, 14 aa, Homo sapiens
  CDR3 for alpha chain variable domain of TCR clone 394498 (TRAV17, TRAJ35)
CATDRPGFWNVLHC

SEQ ID NO: 788996 - protein, 19 aa, Homo sapiens
  CDR3 for beta chain variable domain of TCR clone 394498 (TRBV11-3, TRBJ2-2)
CASSTRPGAKTTNTGELFF

SEQ ID NO: 788997 - protein, 13 aa, Homo sapiens
  CDR3 for alpha chain variable domain of TCR clone 394499 (TRAV2, TRAJ40)
CAVVTSGTYKYIF

SEQ ID NO: 788998 - protein, 15 aa, Homo sapiens
  CDR3 for beta chain variable domain of TCR clone 394499 (TRBV19, TRBJ2-1)
CASSGGGTLYNEQFF

SEQ ID NO: 788999 - protein, 15 aa, Homo sapiens
  CDR3 for alpha chain variable domain of TCR clone 394500 (TRAV19, TRAJ9)
CALSLPDTGGFKTIF

SEQ ID NO: 789000 - protein, 17 aa, Homo sapiens
  CDR3 for beta chain variable domain of TCR clone 394500 (TRBV7-3, TRBJ2-5)
CASSLGSGRSGSETQYF

SEQ ID NO: 789001 - protein, 18 aa, Homo sapiens
  CDR3 for alpha chain variable domain of TCR clone 394501 (TRAV29/DV5, TRAJ52)
CAAGCRGAGGTSYGKLTF

SEQ ID NO: 789002 - protein, 16 aa, Homo sapiens
  CDR3 for beta chain variable domain of TCR clone 394501 (TRBV7-3, TRBJ2-2)
YASSLKRGTLSGELFF

SEQ ID NO: 789003 - protein, 14 aa, Homo sapiens
  CDR3 for alpha chain variable domain of TCR clone 394502 (TRAV1-2, TRAJ17)
CALRRGAAGNKLTF

SEQ ID NO: 789004 - protein, 14 aa, Homo sapiens
  CDR3 for beta chain variable domain of TCR clone 394502 (TRBV7-6, TRBJ2-3)
CASSLGTVTDTQYF

SEQ ID NO: 789005 - protein, 11 aa, Homo sapiens
  CDR3 for alpha chain variable domain of TCR clone 394503 (TRAV26-1, TRAJ27)
CIDPNAGKSTF

SEQ ID NO: 789006 - protein, 13 aa, Homo sapiens
  CDR3 for beta chain variable domain of TCR clone 394503 (TRBV7-7, TRBJ2-3)
CASSLSRADTQYF

SEQ ID NO: 789007 - protein, 14 aa, Homo sapiens
  CDR3 for alpha chain variable domain of TCR clone 394504 (TRAV1-2, TRAJ8)
CAVREDTGFQKLVF

SEQ ID NO: 789008 - protein, 14 aa, Homo sapiens
  CDR3 for beta chain variable domain of TCR clone 394504 (TRBV28, TRBJ2-5)
CASRGSSFWETQYF

SEQ ID NO: 789009 - protein, 14 aa, Homo sapiens
  CDR3 for alpha chain variable domain of TCR clone 394505 (TRAV17, TRAJ12)
CATDGVDSSYKLIF

SEQ ID NO: 789010 - protein, 14 aa, Homo sapiens
  CDR3 for beta chain variable domain of TCR clone 394505 (TRBV7-2, TRBJ2-7)
CASRSQGAAYEQYF

SEQ ID NO: 789011 - protein, 14 aa, Homo sapiens
  CDR3 for alpha chain variable domain of TCR clone 394506 (TRAV2, TRAJ9)
CAVEDRSGGFKTIF

SEQ ID NO: 789012 - protein, 18 aa, Homo sapiens
  CDR3 for beta chain variable domain of TCR clone 394506 (TRBV19, TRBJ2-6)
CASSKNRGTHSGANVLTF

SEQ ID NO: 789013 - protein, 13 aa, Homo sapiens
  CDR3 for alpha chain variable domain of TCR clone 394507 (TRAV20, TRAJ34)
CAVSSYNTDKLIF

SEQ ID NO: 789014 - protein, 13 aa, Homo sapiens
  CDR3 for beta chain variable domain of TCR clone 394507 (TRBV7-9, TRBJ1-2)
CASSLKQYYGYTF

SEQ ID NO: 789015 - protein, 13 aa, Homo sapiens
  CDR3 for alpha chain variable domain of TCR clone 394508 (TRAV41, TRAJ54)
CAVRIQGAQKLVF

SEQ ID NO: 789016 - protein, 13 aa, Homo sapiens
  CDR3 for beta chain variable domain of TCR clone 394508 (TRBV7-9, TRBJ1-2)
CASSLKQNYGYTF

SEQ ID NO: 789017 - protein, 14 aa, Homo sapiens
  CDR3 for alpha chain variable domain of TCR clone 394509 (TRAV8-1, TRAJ34)
CAVITTYNTDKRIF

SEQ ID NO: 789018 - protein, 14 aa, Homo sapiens
  CDR3 for beta chain variable domain of TCR clone 394509 (TRBV11-3, TRBJ1-3)
CASSHNGQGNTIYF

SEQ ID NO: 789019 - protein, 13 aa, Homo sapiens
  CDR3 for alpha chain variable domain of TCR clone 394510 (TRAV2, TRAJ40)
CAVVTSGTYKYIF

SEQ ID NO: 789020 - protein, 17 aa, Homo sapiens
  CDR3 for beta chain variable domain of TCR clone 394510 (TRBV5-1, TRBJ2-5)
CASRRGGLGAGGETQYF

SEQ ID NO: 789021 - protein, 17 aa, Homo sapiens
  CDR3 for alpha chain variable domain of TCR clone 394511 (TRAV3, TRAJ42)
CAVRDRHYGGSQGNLIF

SEQ ID NO: 789022 - protein, 14 aa, Homo sapiens
  CDR3 for beta chain variable domain of TCR clone 394511 (TRBV19, TRBJ2-5)
CASSMTGQQETQYF

SEQ ID NO: 789023 - protein, 12 aa, Homo sapiens
  CDR3 for alpha chain variable domain of TCR clone 394512 (TRAV30, TRAJ43)
CGTEARGNDMRF

SEQ ID NO: 789024 - protein, 13 aa, Homo sapiens
  CDR3 for beta chain variable domain of TCR clone 394512 (TRBV12-4, TRBJ1-2)
CASSSGSKDGYTF

SEQ ID NO: 789025 - protein, 14 aa, Homo sapiens
  CDR3 for alpha chain variable domain of TCR clone 394513 (TRAV35, TRAJ33)
CAGSSQDSNYQLIW

SEQ ID NO: 789026 - protein, 15 aa, Homo sapiens
  CDR3 for beta chain variable domain of TCR clone 394513 (TRBV6-5, TRBJ2-1)
CASSYDAGAGNEQFL

SEQ ID NO: 789027 - protein, 14 aa, Homo sapiens
  CDR3 for alpha chain variable domain of TCR clone 394514 (TRAV12-2, TRAJ11)
CAVEGGSGYSTLTF

SEQ ID NO: 789028 - protein, 19 aa, Homo sapiens
  CDR3 for beta chain variable domain of TCR clone 394514 (TRBV11-2, TRBJ2-3)
CASSLTSGTRFRVTDTQYF

SEQ ID NO: 789029 - protein, 14 aa, Homo sapiens
  CDR3 for alpha chain variable domain of TCR clone 394515 (TRAV12-3, TRAJ58)
CAMSTETSGSRLTF

SEQ ID NO: 789030 - protein, 15 aa, Homo sapiens
  CDR3 for beta chain variable domain of TCR clone 394515 (TRBV11-3, TRBJ1-1)
CASSLGGPGDTEAVF

SEQ ID NO: 789031 - protein, 12 aa, Homo sapiens
  CDR3 for alpha chain variable domain of TCR clone 394516 (TRAV12-3, TRAJ17)
CAMTLIGKKLTF

SEQ ID NO: 789032 - protein, 15 aa, Homo sapiens
  CDR3 for beta chain variable domain of TCR clone 394516 (TRBV20-1, TRBJ2-7)
CSARDRVSGMDEQYF

SEQ ID NO: 789033 - protein, 14 aa, Homo sapiens
  CDR3 for alpha chain variable domain of TCR clone 394517 (TRAV38-1, TRAJ40)
CALRPTSGTYKYIF

SEQ ID NO: 789034 - protein, 12 aa, Homo sapiens
  CDR3 for beta chain variable domain of TCR clone 394517 (TRBV5-1, TRBJ1-2)
WASSQDTYGYTF

SEQ ID NO: 789035 - protein, 16 aa, Homo sapiens
  CDR3 for alpha chain variable domain of TCR clone 394518 (TRAV30, TRAJ24)
CGTEIVGADSWGKFQF

SEQ ID NO: 789036 - protein, 15 aa, Homo sapiens
  CDR3 for beta chain variable domain of TCR clone 394518 (TRBV7-9, TRBJ1-4)
CASSARTGGNDKLFF

SEQ ID NO: 789037 - protein, 15 aa, Homo sapiens
  CDR3 for alpha chain variable domain of TCR clone 394519 (TRAV21, TRAJ24)
CTARFSTDSWGKLQF

SEQ ID NO: 789038 - protein, 13 aa, Homo sapiens
  CDR3 for beta chain variable domain of TCR clone 394519 (TRBV11-2, TRBJ2-5)
CASSSTGEETQYF

SEQ ID NO: 789039 - protein, 13 aa, Homo sapiens
  CDR3 for alpha chain variable domain of TCR clone 394520 (TRAV6, TRAJ5)
CAPADTGRRALTF

SEQ ID NO: 789040 - protein, 16 aa, Homo sapiens
  CDR3 for beta chain variable domain of TCR clone 394520 (TRBV5-7, TRBJ1-5)
CASSLQQDREYQAQHF

SEQ ID NO: 789041 - protein, 12 aa, Homo sapiens
  CDR3 for alpha chain variable domain of TCR clone 394521 (TRAV17, TRAJ12)
CATLRSSYKLIF

SEQ ID NO: 789042 - protein, 16 aa, Homo sapiens
  CDR3 for beta chain variable domain of TCR clone 394521 (TRBV4-2, TRBJ1-1)
CASSQAGFGMNTEAFF

SEQ ID NO: 789043 - protein, 16 aa, Homo sapiens
  CDR3 for alpha chain variable domain of TCR clone 394522 (TRAV12-3, TRAJ53)
CAMSPGSGGGNYKVTF

SEQ ID NO: 789044 - protein, 17 aa, Homo sapiens
  CDR3 for beta chain variable domain of TCR clone 394522 (TRBV11-2, TRBJ2-1)
CASSLYPPGVEYNEQFF

SEQ ID NO: 789045 - protein, 11 aa, Homo sapiens
  CDR3 for alpha chain variable domain of TCR clone 394523 (TRAV27, TRAJ47)
SIVEYGNKLVF

SEQ ID NO: 789046 - protein, 18 aa, Homo sapiens
  CDR3 for beta chain variable domain of TCR clone 394523 (TRBV2, TRBJ2-1)
CAGRGLAGGPRTYNEQFF

SEQ ID NO: 789047 - protein, 15 aa, Homo sapiens
  CDR3 for alpha chain variable domain of TCR clone 394524 (TRAV27, TRAJ38)
FAARRNAGNNRKLIW

SEQ ID NO: 789048 - protein, 15 aa, Homo sapiens
  CDR3 for beta chain variable domain of TCR clone 394524 (TRBV2, TRBJ2-1)
CASSELAGSYNEQFF

SEQ ID NO: 789049 - protein, 16 aa, Homo sapiens
  CDR3 for alpha chain variable domain of TCR clone 394525 (TRAV3, TRAJ21)
CAVRDIERGNFNKFYF

SEQ ID NO: 789050 - protein, 16 aa, Homo sapiens
  CDR3 for beta chain variable domain of TCR clone 394525 (TRBV12-4, TRBJ1-5)
CASSRPVGGSNQAQHF

SEQ ID NO: 789051 - protein, 15 aa, Homo sapiens
  CDR3 for alpha chain variable domain of TCR clone 394526 (TRAV3, TRAJ5)
CAVRDRKTGRRALTF

SEQ ID NO: 789052 - protein, 12 aa, Homo sapiens
  CDR3 for beta chain variable domain of TCR clone 394526 (TRBV12-4, TRBJ2-5)
CASSSAQETLYF

SEQ ID NO: 789053 - protein, 15 aa, Homo sapiens
  CDR3 for alpha chain variable domain of TCR clone 394527 (TRAV27, TRAJ38)
CAARRNAGNNRKLIW

SEQ ID NO: 789054 - protein, 14 aa, Homo sapiens
  CDR3 for beta chain variable domain of TCR clone 394527 (TRBV5-1, TRBJ2-2)
CASSLGGGSGELFF

SEQ ID NO: 789055 - protein, 14 aa, Homo sapiens
  CDR3 for alpha chain variable domain of TCR clone 394528 (TRAV17, TRAJ57)
CATDPQGGSEKLGF

SEQ ID NO: 789056 - protein, 14 aa, Homo sapiens
  CDR3 for beta chain variable domain of TCR clone 394528 (TRBV27, TRBJ2-5)
CASSSLKGWETQYF

SEQ ID NO: 789057 - protein, 13 aa, Homo sapiens
  CDR3 for alpha chain variable domain of TCR clone 394529 (TRAV12-2, TRAJ52)
CAVSGTSYGKLTF

SEQ ID NO: 789058 - protein, 15 aa, Homo sapiens
  CDR3 for beta chain variable domain of TCR clone 394529 (TRBV6-3, TRBJ2-7)
CASSSPGTVFYEQYF

SEQ ID NO: 789059 - protein, 15 aa, Homo sapiens
  CDR3 for alpha chain variable domain of TCR clone 394530 (TRAV13-1, TRAJ44)
CAASRGGGTASTLTF

SEQ ID NO: 789060 - protein, 13 aa, Homo sapiens
  CDR3 for beta chain variable domain of TCR clone 394530 (TRBV7-9, TRBJ2-3)
CASSPGSTDTQYF

SEQ ID NO: 789061 - protein, 15 aa, Homo sapiens
  CDR3 for alpha chain variable domain of TCR clone 394531 (TRAV8-3, TRAJ45)
CASSFSGGGADGLTF

SEQ ID NO: 789062 - protein, 16 aa, Homo sapiens
  CDR3 for beta chain variable domain of TCR clone 394531 (TRBV7-9, TRBJ2-2)
CASSGFGGANTGELFF

SEQ ID NO: 789063 - protein, 16 aa, Homo sapiens
  CDR3 for alpha chain variable domain of TCR clone 394532 (TRAV30, TRAJ24)
CGTEIVDAASWGKFQF

SEQ ID NO: 789064 - protein, 14 aa, Homo sapiens
  CDR3 for beta chain variable domain of TCR clone 394532 (TRBV7-2, TRBJ2-7)
CASSPKTSFYEQYF

SEQ ID NO: 789065 - protein, 13 aa, Homo sapiens
  CDR3 for alpha chain variable domain of TCR clone 394533 (TRAV8-3, TRAJ44)
CAVVPGTASKLTF

SEQ ID NO: 789066 - protein, 14 aa, Homo sapiens
  CDR3 for beta chain variable domain of TCR clone 394533 (TRBV11-2, TRBJ2-3)
CASSRLARTDKQYF

SEQ ID NO: 789067 - protein, 17 aa, Homo sapiens
  CDR3 for alpha chain variable domain of TCR clone 394534 (TRAV3, TRAJ6)
CAMRDGPRAGGSYIPTF

SEQ ID NO: 789068 - protein, 15 aa, Homo sapiens
  CDR3 for beta chain variable domain of TCR clone 394534 (TRBV7-8, TRBJ1-5)
CASSLERRGLEPQHF

SEQ ID NO: 789069 - protein, 13 aa, Homo sapiens
  CDR3 for alpha chain variable domain of TCR clone 394535 (TRAV1-2, TRAJ9)
CAALNTGGFKTIF

SEQ ID NO: 789070 - protein, 12 aa, Homo sapiens
  CDR3 for beta chain variable domain of TCR clone 394535 (TRBV20-1, TRBJ2-1)
CSAQYTYNEQFF

SEQ ID NO: 789071 - protein, 12 aa, Homo sapiens
  CDR3 for alpha chain variable domain of TCR clone 394536 (TRAV16, TRAJ10)
CSRTGGGNKLTF

SEQ ID NO: 789072 - protein, 16 aa, Homo sapiens
  CDR3 for beta chain variable domain of TCR clone 394536 (TRBV4-2, TRBJ1-1)
CASSPSPGRAAPEAFF

SEQ ID NO: 789073 - protein, 12 aa, Homo sapiens
  CDR3 for alpha chain variable domain of TCR clone 394537 (TRAV8-3, TRAJ26)
CAGDNYGQNIVF

SEQ ID NO: 789074 - protein, 12 aa, Homo sapiens
  CDR3 for beta chain variable domain of TCR clone 394537 (TRBV11-2, TRBJ2-2)
CASSLGGGELFF

SEQ ID NO: 789075 - protein, 15 aa, Homo sapiens
  CDR3 for alpha chain variable domain of TCR clone 394538 (TRAV17, TRAJ42)
CATDHYGGSQGNLLF

SEQ ID NO: 789076 - protein, 15 aa, Homo sapiens
  CDR3 for beta chain variable domain of TCR clone 394538 (TRBV19, TRBJ2-7)
CASSPAGSGEALRYF

SEQ ID NO: 789077 - protein, 18 aa, Homo sapiens
  CDR3 for alpha chain variable domain of TCR clone 394539 (TRAV13-1, TRAJ52)
CAAKNPNAGGTSYGELTF

SEQ ID NO: 789078 - protein, 15 aa, Homo sapiens
  CDR3 for beta chain variable domain of TCR clone 394539 (TRBV27, TRBJ2-1)
CASSNGGGSANEQFF

SEQ ID NO: 789079 - protein, 13 aa, Homo sapiens
  CDR3 for alpha chain variable domain of TCR clone 394540 (TRAV21, TRAJ57)
CAVTQGGSEKLVF

SEQ ID NO: 789080 - protein, 17 aa, Homo sapiens
  CDR3 for beta chain variable domain of TCR clone 394540 (TRBV13, TRBJ2-3)
CASSLSRVAGGRNTQYC

SEQ ID NO: 789081 - protein, 12 aa, Homo sapiens
  CDR3 for alpha chain variable domain of TCR clone 394541 (TRAV4, TRAJ6)
CLAPGGSYIPTF

SEQ ID NO: 789082 - protein, 13 aa, Homo sapiens
  CDR3 for beta chain variable domain of TCR clone 394541 (TRBV12-4, TRBJ1-2)
CASSLRQGKGYTF

SEQ ID NO: 789083 - protein, 13 aa, Homo sapiens
  CDR3 for alpha chain variable domain of TCR clone 394542 (TRAV13-1, TRAJ21)
WAASIYNFNKFYF

SEQ ID NO: 789084 - protein, 13 aa, Homo sapiens
  CDR3 for beta chain variable domain of TCR clone 394542 (TRBV27, TRBJ1-4)
CASSLMGDEKLFF

SEQ ID NO: 789085 - protein, 12 aa, Homo sapiens
  CDR3 for alpha chain variable domain of TCR clone 394543 (TRAV12-2, TRAJ21)
CAVRYNFNKFYF

SEQ ID NO: 789086 - protein, 14 aa, Homo sapiens
  CDR3 for beta chain variable domain of TCR clone 394543 (TRBV28, TRBJ2-1)
CTSSYYTAYNEQFF

SEQ ID NO: 789087 - protein, 17 aa, Homo sapiens
  CDR3 for alpha chain variable domain of TCR clone 394544 (TRAV8-2, TRAJ4)
CVVSPSGGYNKDFWSRD

SEQ ID NO: 789088 - protein, 15 aa, Homo sapiens
  CDR3 for beta chain variable domain of TCR clone 394544 (TRBV4-1, TRBJ1-4)
CASSDTGGTNEKLFF

SEQ ID NO: 789089 - protein, 17 aa, Homo sapiens
  CDR3 for alpha chain variable domain of TCR clone 394545 (TRAV3, TRAJ6)
CAVRDGPRAGGSYLPTF

SEQ ID NO: 789090 - protein, 14 aa, Homo sapiens
  CDR3 for beta chain variable domain of TCR clone 394545 (TRBV7-2, TRBJ1-1)
CASSFLTGTTEAFF

SEQ ID NO: 789091 - protein, 17 aa, Homo sapiens
  CDR3 for alpha chain variable domain of TCR clone 394546 (TRAV3, TRAJ4)
CAVRDGTGGYNKLILEQ

SEQ ID NO: 789092 - protein, 12 aa, Homo sapiens
  CDR3 for beta chain variable domain of TCR clone 394546 (TRBV11-3, TRBJ2-3)
CASSLWEDTQYF

SEQ ID NO: 789093 - protein, 12 aa, Homo sapiens
  CDR3 for alpha chain variable domain of TCR clone 394547 (TRAV12-1, TRAJ31)
CVSWNNNARLVF

SEQ ID NO: 789094 - protein, 15 aa, Homo sapiens
  CDR3 for beta chain variable domain of TCR clone 394547 (TRBV7-2, TRBJ1-5)
CASSLDRGQDQPQHF

SEQ ID NO: 789095 - protein, 13 aa, Homo sapiens
  CDR3 for alpha chain variable domain of TCR clone 394548 (TRAV27, TRAJ49)
CAPRPYTGNQFYF

SEQ ID NO: 789096 - protein, 16 aa, Homo sapiens
  CDR3 for beta chain variable domain of TCR clone 394548 (TRBV4-1, TRBJ1-2)
WASSQDAGQVLYGYTF

SEQ ID NO: 789097 - protein, 13 aa, Homo sapiens
  CDR3 for alpha chain variable domain of TCR clone 394549 (TRAV8-3, TRAJ36)
CAVGAAGANNLFF

SEQ ID NO: 789098 - protein, 11 aa, Homo sapiens
  CDR3 for beta chain variable domain of TCR clone 394549 (TRBV5-5, TRBJ2-7)
CASSLAYEQYF

SEQ ID NO: 789099 - protein, 14 aa, Homo sapiens
  CDR3 for alpha chain variable domain of TCR clone 394550 (TRAV14/DV4, TRAJ54)
CAMREAPGAKKLVF

SEQ ID NO: 789100 - protein, 15 aa, Homo sapiens
  CDR3 for beta chain variable domain of TCR clone 394550 (TRBV5-1, TRBJ2-7)
CASSLNGGPAREQYF

SEQ ID NO: 789101 - protein, 13 aa, Homo sapiens
  CDR3 for alpha chain variable domain of TCR clone 394551 (TRAV12-2, TRAJ20)
CAVYPSNDYKLSF

SEQ ID NO: 789102 - protein, 16 aa, Homo sapiens
  CDR3 for beta chain variable domain of TCR clone 394551 (TRBV11-2, TRBJ2-2)
CASSTHRGSDTGELFL

SEQ ID NO: 789103 - protein, 13 aa, Homo sapiens
  CDR3 for alpha chain variable domain of TCR clone 394552 (TRAV25, TRAJ26)
CAGMDNYGQNFVF

SEQ ID NO: 789104 - protein, 13 aa, Homo sapiens
  CDR3 for beta chain variable domain of TCR clone 394552 (TRBV7-9, TRBJ1-2)
CASSLKQNYGYTF

SEQ ID NO: 789105 - protein, 17 aa, Homo sapiens
  CDR3 for alpha chain variable domain of TCR clone 394553 (TRAV12-1, TRAJ52)
CVVTPNAGGTSYGKLTF

SEQ ID NO: 789106 - protein, 15 aa, Homo sapiens
  CDR3 for beta chain variable domain of TCR clone 394553 (TRBV10-3, TRBJ2-1)
CAISDVQDRAYEQFF

SEQ ID NO: 789107 - protein, 15 aa, Homo sapiens
  CDR3 for alpha chain variable domain of TCR clone 394554 (TRAV8-3, TRAJ6)
CAVGSAGGGSYIPTF

SEQ ID NO: 789108 - protein, 14 aa, Homo sapiens
  CDR3 for beta chain variable domain of TCR clone 394554 (TRBV18, TRBJ2-7)
CASSPRGGAYEQYF

SEQ ID NO: 789109 - protein, 14 aa, Homo sapiens
  CDR3 for alpha chain variable domain of TCR clone 394555 (TRAV21, TRAJ45)
LAVHSGGGADGLTF

SEQ ID NO: 789110 - protein, 14 aa, Homo sapiens
  CDR3 for beta chain variable domain of TCR clone 394555 (TRBV20-1, TRBJ2-1)
CSARRLAEANEQFF

SEQ ID NO: 789111 - protein, 12 aa, Homo sapiens
  CDR3 for alpha chain variable domain of TCR clone 394556 (TRAV12-2, TRAJ16)
CAVNLDGQKLLF

SEQ ID NO: 789112 - protein, 13 aa, Homo sapiens
  CDR3 for beta chain variable domain of TCR clone 394556 (TRBV6-6, TRBJ2-7)
CGSSPKHLAEQYF

SEQ ID NO: 789113 - protein, 13 aa, Homo sapiens
  CDR3 for alpha chain variable domain of TCR clone 394557 (TRAV12-1, TRAJ13)
CVVAPGGYQKVTF

SEQ ID NO: 789114 - protein, 13 aa, Homo sapiens
  CDR3 for beta chain variable domain of TCR clone 394557 (TRBV10-3, TRBJ2-7)
CASKLAVNYEQYF

SEQ ID NO: 789115 - protein, 11 aa, Homo sapiens
  CDR3 for alpha chain variable domain of TCR clone 394558 (TRAV12-2, TRAJ31)
CAILNNARLMF

SEQ ID NO: 789116 - protein, 16 aa, Homo sapiens
  CDR3 for beta chain variable domain of TCR clone 394558 (TRBV13, TRBJ2-2)
CASSPRTGEHTGDLFF

SEQ ID NO: 789117 - protein, 13 aa, Homo sapiens
  CDR3 for alpha chain variable domain of TCR clone 394559 (TRAV27, TRAJ40)
CAGPLSGTYKYIF

SEQ ID NO: 789118 - protein, 13 aa, Homo sapiens
  CDR3 for beta chain variable domain of TCR clone 394559 (TRBV28, TRBJ1-2)
CAGRDRGNYGYTF

SEQ ID NO: 789119 - protein, 14 aa, Homo sapiens
  CDR3 for alpha chain variable domain of TCR clone 394560 (TRAV35, TRAJ44)
CAGRNTGTASKLTF

SEQ ID NO: 789120 - protein, 13 aa, Homo sapiens
  CDR3 for beta chain variable domain of TCR clone 394560 (TRBV10-3, TRBJ2-5)
CAMTSGAGETQYF

SEQ ID NO: 789121 - protein, 17 aa, Homo sapiens
  CDR3 for alpha chain variable domain of TCR clone 394561 (TRAV12-2, TRAJ45)
CAVNRGAAGGGADGLTF

SEQ ID NO: 789122 - protein, 12 aa, Homo sapiens
  CDR3 for beta chain variable domain of TCR clone 394561 (TRBV3-1, TRBJ2-1)
CASSQGSSGQFF

SEQ ID NO: 789123 - protein, 16 aa, Homo sapiens
  CDR3 for alpha chain variable domain of TCR clone 394562 (TRAV16, TRAJ4)
CALSRMFSGGYNKLIF

SEQ ID NO: 789124 - protein, 13 aa, Homo sapiens
  CDR3 for beta chain variable domain of TCR clone 394562 (TRBV12-4, TRBJ1-1)
CASSLGGTTEAFF

SEQ ID NO: 789125 - protein, 16 aa, Homo sapiens
  CDR3 for alpha chain variable domain of TCR clone 394563 (TRAV12-1, TRAJ43)
CVVNPHRFGAGTRLAV

SEQ ID NO: 789126 - protein, 13 aa, Homo sapiens
  CDR3 for beta chain variable domain of TCR clone 394563 (TRBV7-9, TRBJ2-7)
CASSFAGAYEQYF

SEQ ID NO: 789127 - protein, 13 aa, Homo sapiens
  CDR3 for alpha chain variable domain of TCR clone 394564 (TRAV12-3, TRAJ7)
CAMSASGNNRLAF

SEQ ID NO: 789128 - protein, 14 aa, Homo sapiens
  CDR3 for beta chain variable domain of TCR clone 394564 (TRBV15, TRBJ2-5)
CATSGDRGQETQYF

SEQ ID NO: 789129 - protein, 11 aa, Homo sapiens
  CDR3 for alpha chain variable domain of TCR clone 394565 (TRAV12-1, TRAJ30)
CVVNGQDKIIF

SEQ ID NO: 789130 - protein, 15 aa, Homo sapiens
  CDR3 for beta chain variable domain of TCR clone 394565 (TRBV7-2, TRBJ2-1)
CASSSALAGGNEQFF

SEQ ID NO: 789131 - protein, 12 aa, Homo sapiens
  CDR3 for alpha chain variable domain of TCR clone 394566 (TRAV30, TRAJ43)
EPTSAALSDMRF

SEQ ID NO: 789132 - protein, 15 aa, Homo sapiens
  CDR3 for beta chain variable domain of TCR clone 394566 (TRBV5-1, TRBJ2-1)
CASSPPRAPYNEQFF

SEQ ID NO: 789133 - protein, 15 aa, Homo sapiens
  CDR3 for alpha chain variable domain of TCR clone 394567 (TRAV8-6, TRAJ11)
CAVNFMNSGYSTLTF

SEQ ID NO: 789134 - protein, 16 aa, Homo sapiens
  CDR3 for beta chain variable domain of TCR clone 394567 (TRBV5-1, TRBJ1-5)
CASSYGTGGSNQPQHF

SEQ ID NO: 789135 - protein, 15 aa, Homo sapiens
  CDR3 for alpha chain variable domain of TCR clone 394568 (TRAV17, TRAJ56)
CATEPCTGANSKLTF

SEQ ID NO: 789136 - protein, 14 aa, Homo sapiens
  CDR3 for beta chain variable domain of TCR clone 394568 (TRBV19, TRBJ2-1)
CASPTFVLSGEQFF

SEQ ID NO: 789137 - protein, 13 aa, Homo sapiens
  CDR3 for alpha chain variable domain of TCR clone 394569 (TRAV21, TRAJ27)
CAALNTNAGKSTF

SEQ ID NO: 789138 - protein, 17 aa, Homo sapiens
  CDR3 for beta chain variable domain of TCR clone 394569 (TRBV3-1, TRBJ2-5)
CASSQGLAGMYQETQYF

SEQ ID NO: 789139 - protein, 17 aa, Homo sapiens
  CDR3 for alpha chain variable domain of TCR clone 394570 (TRAV36/DV7, TRAJ52)
CAVAQRAGGTSYGKLTF

SEQ ID NO: 789140 - protein, 10 aa, Homo sapiens
  CDR3 for beta chain variable domain of TCR clone 394570 (TRBV28, TRBJ1-2)
CASSQFGYTF

SEQ ID NO: 789141 - protein, 11 aa, Homo sapiens
  CDR3 for alpha chain variable domain of TCR clone 394571 (TRAV12-2, TRAJ29)
CAVTLRSPLVF

SEQ ID NO: 789142 - protein, 16 aa, Homo sapiens
  CDR3 for beta chain variable domain of TCR clone 394571 (TRBV19, TRBJ1-5)
CASSIDRGGTRQPQHF

SEQ ID NO: 789143 - protein, 15 aa, Homo sapiens
  CDR3 for alpha chain variable domain of TCR clone 394572 (TRAV8-3, TRAJ11)
CAVGLLNSGYSTLTF

SEQ ID NO: 789144 - protein, 14 aa, Homo sapiens
  CDR3 for beta chain variable domain of TCR clone 394572 (TRBV4-1, TRBJ2-7)
CASRLTSGSYEQYF

SEQ ID NO: 789145 - protein, 16 aa, Homo sapiens
  CDR3 for alpha chain variable domain of TCR clone 394573 (TRAV29/DV5, TRAJ39)
CAASLLFNNAGNMLTF

SEQ ID NO: 789146 - protein, 16 aa, Homo sapiens
  CDR3 for beta chain variable domain of TCR clone 394573 (TRBV19, TRBJ2-6)
CASSMSGLSVANDLTF

SEQ ID NO: 789147 - protein, 15 aa, Homo sapiens
  CDR3 for alpha chain variable domain of TCR clone 394574 (TRAV8-4, TRAJ11)
FAVSRALSGYSTLTF

SEQ ID NO: 789148 - protein, 13 aa, Homo sapiens
  CDR3 for beta chain variable domain of TCR clone 394574 (TRBV10-3, TRBJ2-7)
CASKLAVNYEQYF

SEQ ID NO: 789149 - protein, 12 aa, Homo sapiens
  CDR3 for alpha chain variable domain of TCR clone 394575 (TRAV12-3, TRAJ20)
CAMVRGDYKLSF

SEQ ID NO: 789150 - protein, 13 aa, Homo sapiens
  CDR3 for beta chain variable domain of TCR clone 394575 (TRBV20-1, TRBJ1-1)
CSARVGGNTEAFF

SEQ ID NO: 789151 - protein, 17 aa, Homo sapiens
  CDR3 for alpha chain variable domain of TCR clone 394576 (TRAV12-2, TRAJ22)
CAVNRIPFSGSARQLTF

SEQ ID NO: 789152 - protein, 18 aa, Homo sapiens
  CDR3 for beta chain variable domain of TCR clone 394576 (TRBV20-1, TRBJ2-3)
CSASGLAGGPGTTDTQYF

SEQ ID NO: 789153 - protein, 15 aa, Homo sapiens
  CDR3 for alpha chain variable domain of TCR clone 394577 (TRAV2, TRAJ11)
CAVGGRNSGYSTLTF

SEQ ID NO: 789154 - protein, 16 aa, Homo sapiens
  CDR3 for beta chain variable domain of TCR clone 394577 (TRBV7-9, TRBJ2-3)
CASSPWREVGTDTQYF

SEQ ID NO: 789155 - protein, 14 aa, Homo sapiens
  CDR3 for alpha chain variable domain of TCR clone 394578 (TRAV1-2, TRAJ8)
CAVREDTGFQKLVS

SEQ ID NO: 789156 - protein, 15 aa, Homo sapiens
  CDR3 for beta chain variable domain of TCR clone 394578 (TRBV10-2, TRBJ2-6)
CASSGQGTGANVLTF

SEQ ID NO: 789157 - protein, 16 aa, Homo sapiens
  CDR3 for alpha chain variable domain of TCR clone 394579 (TRAV9-2, TRAJ10)
CALSEGGTGGGNKLTF

SEQ ID NO: 789158 - protein, 16 aa, Homo sapiens
  CDR3 for beta chain variable domain of TCR clone 394579 (TRBV7-2, TRBJ1-4)
CASSPVGRFDREKLFI

SEQ ID NO: 789159 - protein, 13 aa, Homo sapiens
  CDR3 for alpha chain variable domain of TCR clone 394580 (TRAV21, TRAJ27)
CAARPGNAGKTTF

SEQ ID NO: 789160 - protein, 13 aa, Homo sapiens
  CDR3 for beta chain variable domain of TCR clone 394580 (TRBV7-3, TRBJ2-7)
CASSQAGGYEQYF

SEQ ID NO: 789161 - protein, 12 aa, Homo sapiens
  CDR3 for alpha chain variable domain of TCR clone 394581 (TRAV13-2, TRAJ23)
CAERHRGGKLIF

SEQ ID NO: 789162 - protein, 15 aa, Homo sapiens
  CDR3 for beta chain variable domain of TCR clone 394581 (TRBV9, TRBJ1-6)
CASSVAGTGDSPLHV

SEQ ID NO: 789163 - protein, 14 aa, Homo sapiens
  CDR3 for alpha chain variable domain of TCR clone 394582 (TRAV1-2, TRAJ16)
CAVNRVSDGQKLLF

SEQ ID NO: 789164 - protein, 15 aa, Homo sapiens
  CDR3 for beta chain variable domain of TCR clone 394582 (TRBV7-9, TRBJ1-6)
CASCSPGRGNSPLHF

SEQ ID NO: 789165 - protein, 18 aa, Homo sapiens
  CDR3 for alpha chain variable domain of TCR clone 394583 (TRAV3, TRAJ17)
CAVRARRGGRSCRQQANF

SEQ ID NO: 789166 - protein, 15 aa, Homo sapiens
  CDR3 for beta chain variable domain of TCR clone 394583 (TRBV28, TRBJ2-3)
CAPTFRDWSTDTQYF

SEQ ID NO: 789167 - protein, 13 aa, Homo sapiens
  CDR3 for alpha chain variable domain of TCR clone 394584 (TRAV35, TRAJ27)
CAGENTNAGKSTF

SEQ ID NO: 789168 - protein, 16 aa, Homo sapiens
  CDR3 for beta chain variable domain of TCR clone 394584 (TRBV7-3, TRBJ2-1)
CAGSPGAGTYYNEQFF

SEQ ID NO: 789169 - protein, 13 aa, Homo sapiens
  CDR3 for alpha chain variable domain of TCR clone 394585 (TRAV21, TRAJ11)
CAVPNSGYSTLTF

SEQ ID NO: 789170 - protein, 16 aa, Homo sapiens
  CDR3 for beta chain variable domain of TCR clone 394585 (TRBV7-9, TRBJ2-1)
CASSDVAGGSYNEQFF

SEQ ID NO: 789171 - protein, 13 aa, Homo sapiens
  CDR3 for alpha chain variable domain of TCR clone 394586 (TRAV12-1, TRAJ6)
CVVYPGGSYIPTF

SEQ ID NO: 789172 - protein, 13 aa, Homo sapiens
  CDR3 for beta chain variable domain of TCR clone 394586 (TRBV4-2, TRBJ1-1)
CASSEAGNTEAFF

SEQ ID NO: 789173 - protein, 12 aa, Homo sapiens
  CDR3 for alpha chain variable domain of TCR clone 394587 (TRAV35, TRAJ30)
CAGLNRDDKIIF

SEQ ID NO: 789174 - protein, 15 aa, Homo sapiens
  CDR3 for beta chain variable domain of TCR clone 394587 (TRBV18, TRBJ2-3)
CARSPLAGETDTQYF

SEQ ID NO: 789175 - protein, 14 aa, Homo sapiens
  CDR3 for alpha chain variable domain of TCR clone 394588 (TRAV8-6, TRAJ48)
CAVRTNFGNEKLNF

SEQ ID NO: 789176 - protein, 14 aa, Homo sapiens
  CDR3 for beta chain variable domain of TCR clone 394588 (TRBV6-1, TRBJ1-3)
CASVQGGGGNTIYF

SEQ ID NO: 789177 - protein, 14 aa, Homo sapiens
  CDR3 for alpha chain variable domain of TCR clone 394589 (TRAV8-4, TRAJ13)
CAVTLSGGYQKVTF

SEQ ID NO: 789178 - protein, 12 aa, Homo sapiens
  CDR3 for beta chain variable domain of TCR clone 394589 (TRBV12-4, TRBJ2-7)
CASSLGGYEQYF

SEQ ID NO: 789179 - protein, 13 aa, Homo sapiens
  CDR3 for alpha chain variable domain of TCR clone 394590 (TRAV13-1, TRAJ29)
CAASIGLNTPLVF

SEQ ID NO: 789180 - protein, 16 aa, Homo sapiens
  CDR3 for beta chain variable domain of TCR clone 394590 (TRBV12-5, TRBJ2-5)
CASGPRTSGNQETQYF

SEQ ID NO: 789181 - protein, 14 aa, Homo sapiens
  CDR3 for alpha chain variable domain of TCR clone 394591 (TRAV23/DV6, TRAJ39)
CAASIGNAGNMLTF

SEQ ID NO: 789182 - protein, 14 aa, Homo sapiens
  CDR3 for beta chain variable domain of TCR clone 394591 (TRBV7-9, TRBJ2-7)
CASSTTTGRDEQYF

SEQ ID NO: 789183 - protein, 14 aa, Homo sapiens
  CDR3 for alpha chain variable domain of TCR clone 394592 (TRAV12-2, TRAJ13)
CAVKKTGGYQKVTF

SEQ ID NO: 789184 - protein, 17 aa, Homo sapiens
  CDR3 for beta chain variable domain of TCR clone 394592 (TRBV28, TRBJ2-5)
CASSRQGGLAGTETQYF

SEQ ID NO: 789185 - protein, 16 aa, Homo sapiens
  CDR3 for alpha chain variable domain of TCR clone 394593 (TRAV26-1, TRAJ53)
CIVRVALGGSNYTLTF

SEQ ID NO: 789186 - protein, 16 aa, Homo sapiens
  CDR3 for beta chain variable domain of TCR clone 394593 (TRBV12-5, TRBJ2-5)
CASGPRTSGNQETQYF

SEQ ID NO: 789187 - protein, 12 aa, Homo sapiens
  CDR3 for alpha chain variable domain of TCR clone 394594 (TRAV17, TRAJ4)
CATDGGYNKLIF

SEQ ID NO: 789188 - protein, 16 aa, Homo sapiens
  CDR3 for beta chain variable domain of TCR clone 394594 (TRBV7-3, TRBJ2-2)
CASSLKRGTLSGELFF

SEQ ID NO: 789189 - protein, 11 aa, Homo sapiens
  CDR3 for alpha chain variable domain of TCR clone 394595 (TRAV3, TRAJ21)
CAVGNFNKFYF

SEQ ID NO: 789190 - protein, 11 aa, Homo sapiens
  CDR3 for beta chain variable domain of TCR clone 394595 (TRBV10-3, TRBJ2-7)
CAISEGLEQYF

SEQ ID NO: 789191 - protein, 15 aa, Homo sapiens
  CDR3 for alpha chain variable domain of TCR clone 394596 (TRAV4, TRAJ39)
CLVGPNNNAGNMLTF

SEQ ID NO: 789192 - protein, 14 aa, Homo sapiens
  CDR3 for beta chain variable domain of TCR clone 394596 (TRBV11-2, TRBJ2-5)
CVSSRTGGIETQYF

SEQ ID NO: 789193 - protein, 13 aa, Homo sapiens
  CDR3 for alpha chain variable domain of TCR clone 394597 (TRAV29/DV5, TRAJ31)
CAASRNNNARLIF

SEQ ID NO: 789194 - protein, 12 aa, Homo sapiens
  CDR3 for beta chain variable domain of TCR clone 394597 (TRBV14, TRBJ2-7)
CASSSLKGEQYF

SEQ ID NO: 789195 - protein, 15 aa, Homo sapiens
  CDR3 for alpha chain variable domain of TCR clone 394598 (TRAV8-4, TRAJ37)
CAVSRGSGNSGKLIF

SEQ ID NO: 789196 - protein, 15 aa, Homo sapiens
  CDR3 for beta chain variable domain of TCR clone 394598 (TRBV5-1, TRBJ2-7)
CASSLDFTSSYEQYF

SEQ ID NO: 789197 - protein, 16 aa, Homo sapiens
  CDR3 for alpha chain variable domain of TCR clone 394599 (TRAV17, TRAJ22)
CATGPISSGSARQLTF

SEQ ID NO: 789198 - protein, 11 aa, Homo sapiens
  CDR3 for beta chain variable domain of TCR clone 394599 (TRBV5-1, TRBJ2-5)
CASSYQETQYF

SEQ ID NO: 789199 - protein, 15 aa, Homo sapiens
  CDR3 for alpha chain variable domain of TCR clone 394600 (TRAV8-1, TRAJ6)
CAVNTPPGGSYILTF

SEQ ID NO: 789200 - protein, 15 aa, Homo sapiens
  CDR3 for beta chain variable domain of TCR clone 394600 (TRBV11-2, TRBJ2-2)
CASSSDRVNAGELFF

SEQ ID NO: 789201 - protein, 13 aa, Homo sapiens
  CDR3 for alpha chain variable domain of TCR clone 394601 (TRAV12-2, TRAJ31)
CAVKADNNARLMF

SEQ ID NO: 789202 - protein, 15 aa, Homo sapiens
  CDR3 for beta chain variable domain of TCR clone 394601 (TRBV15, TRBJ1-5)
CATSREQGGNQPQYF

SEQ ID NO: 789203 - protein, 12 aa, Homo sapiens
  CDR3 for alpha chain variable domain of TCR clone 394602 (TRAV13-1, TRAJ21)
CAAKEGFNKFYF

SEQ ID NO: 789204 - protein, 17 aa, Homo sapiens
  CDR3 for beta chain variable domain of TCR clone 394602 (TRBV10-3, TRBJ2-4)
CTSVPSVNKGSKNIQYF

SEQ ID NO: 789205 - protein, 15 aa, Homo sapiens
  CDR3 for alpha chain variable domain of TCR clone 394603 (TRAV13-1, TRAJ17)
CAASIERAAGNKLTF

SEQ ID NO: 789206 - protein, 13 aa, Homo sapiens
  CDR3 for beta chain variable domain of TCR clone 394603 (TRBV10-3, TRBJ2-7)
CASKLAVYYEQYF

SEQ ID NO: 789207 - protein, 12 aa, Homo sapiens
  CDR3 for alpha chain variable domain of TCR clone 394604 (TRAV10, TRAJ34)
CVVSGKHRQAHL

SEQ ID NO: 789208 - protein, 14 aa, Homo sapiens
  CDR3 for beta chain variable domain of TCR clone 394604 (TRBV19, TRBJ2-1)
CASTTFVLSGEQFF

SEQ ID NO: 789209 - protein, 18 aa, Homo sapiens
  CDR3 for alpha chain variable domain of TCR clone 394605 (TRAV26-1, TRAJ30)
CCVLLHRQSTNRDDKIIF

SEQ ID NO: 789210 - protein, 18 aa, Homo sapiens
  CDR3 for beta chain variable domain of TCR clone 394605 (TRBV4-1, TRBJ1-5)
CASSQDPRGHGLNQPQHF

SEQ ID NO: 789211 - protein, 14 aa, Homo sapiens
  CDR3 for alpha chain variable domain of TCR clone 394606 (TRAV13-1, TRAJ35)
CAASKGGFGNVRHC

SEQ ID NO: 789212 - protein, 13 aa, Homo sapiens
  CDR3 for beta chain variable domain of TCR clone 394606 (TRBV7-3, TRBJ1-1)
CASSEDWGAEAFF

SEQ ID NO: 789213 - protein, 15 aa, Homo sapiens
  CDR3 for alpha chain variable domain of TCR clone 394607 (TRAV8-4, TRAJ10)
CAVSDGPGGGNKLTF

SEQ ID NO: 789214 - protein, 14 aa, Homo sapiens
  CDR3 for beta chain variable domain of TCR clone 394607 (TRBV7-3, TRBJ2-5)
CASSLTGGQETQYF

SEQ ID NO: 789215 - protein, 12 aa, Homo sapiens
  CDR3 for alpha chain variable domain of TCR clone 394608 (TRAV13-1, TRAJ48)
CAANFGNEKLPF

SEQ ID NO: 789216 - protein, 12 aa, Homo sapiens
  CDR3 for beta chain variable domain of TCR clone 394608 (TRBV7-8, TRBJ2-7)
CASSLGDREQYF

SEQ ID NO: 789217 - protein, 15 aa, Homo sapiens
  CDR3 for alpha chain variable domain of TCR clone 394609 (TRAV3, TRAJ22)
CAVRDRGGSARQLTF

SEQ ID NO: 789218 - protein, 15 aa, Homo sapiens
  CDR3 for beta chain variable domain of TCR clone 394609 (TRBV6-5, TRBJ2-3)
CASSYSGSSTDTQYF

SEQ ID NO: 789219 - protein, 17 aa, Homo sapiens
  CDR3 for alpha chain variable domain of TCR clone 394610 (TRAV4, TRAJ42)
CLVGVLNYGGSQGSLIF

SEQ ID NO: 789220 - protein, 12 aa, Homo sapiens
  CDR3 for beta chain variable domain of TCR clone 394610 (TRBV20-1, TRBJ2-1)
CSAQYTYNGQFF

SEQ ID NO: 789221 - protein, 13 aa, Homo sapiens
  CDR3 for alpha chain variable domain of TCR clone 394611 (TRAV36/DV7, TRAJ37)
CAVFSSNTGKLIF

SEQ ID NO: 789222 - protein, 15 aa, Homo sapiens
  CDR3 for beta chain variable domain of TCR clone 394611 (TRBV12-4, TRBJ2-5)
CQQFFVKGRQETQYF

SEQ ID NO: 789223 - protein, 17 aa, Homo sapiens
  CDR3 for alpha chain variable domain of TCR clone 394612 (TRAV27, TRAJ42)
CAERVSYYGVSQGNLIF

SEQ ID NO: 789224 - protein, 14 aa, Homo sapiens
  CDR3 for beta chain variable domain of TCR clone 394612 (TRBV6-6, TRBJ2-3)
CASRLQREADTQYF

SEQ ID NO: 789225 - protein, 13 aa, Homo sapiens
  CDR3 for alpha chain variable domain of TCR clone 394613 (TRAV20, TRAJ21)
CAVEGYNFNKFYF

SEQ ID NO: 789226 - protein, 17 aa, Homo sapiens
  CDR3 for beta chain variable domain of TCR clone 394613 (TRBV28, TRBJ2-5)
CASSRQGGLAGAETQYF

SEQ ID NO: 789227 - protein, 16 aa, Homo sapiens
  CDR3 for alpha chain variable domain of TCR clone 394614 (TRAV30, TRAJ24)
CGTDIVDADSWGKFQF

SEQ ID NO: 789228 - protein, 14 aa, Homo sapiens
  CDR3 for beta chain variable domain of TCR clone 394614 (TRBV12-5, TRBJ2-5)
CASGSRTQQENQYF

SEQ ID NO: 789229 - protein, 19 aa, Homo sapiens
  CDR3 for alpha chain variable domain of TCR clone 394615 (TRAV12-3, TRAJ24)
SLFIRDSQPRADSWGKFQF

SEQ ID NO: 789230 - protein, 15 aa, Homo sapiens
  CDR3 for beta chain variable domain of TCR clone 394615 (TRBV5-1, TRBJ2-2)
CASSTFNINTGELFF

SEQ ID NO: 789231 - protein, 14 aa, Homo sapiens
  CDR3 for alpha chain variable domain of TCR clone 394616 (TRAV29/DV5, TRAJ36)
CAERGKTGANNLFF

SEQ ID NO: 789232 - protein, 14 aa, Homo sapiens
  CDR3 for beta chain variable domain of TCR clone 394616 (TRBV19, TRBJ2-1)
CASPTFVLSGEQFF

SEQ ID NO: 789233 - protein, 16 aa, Homo sapiens
  CDR3 for alpha chain variable domain of TCR clone 394617 (TRAV1-2, TRAJ16)
NVLDGLEEKDGQKLLF

SEQ ID NO: 789234 - protein, 13 aa, Homo sapiens
  CDR3 for beta chain variable domain of TCR clone 394617 (TRBV7-2, TRBJ2-2)
CASSLAVTGELFF

SEQ ID NO: 789235 - protein, 14 aa, Homo sapiens
  CDR3 for alpha chain variable domain of TCR clone 394618 (TRAV2, TRAJ26)
CAVERDNYGQNFVF

SEQ ID NO: 789236 - protein, 15 aa, Homo sapiens
  CDR3 for beta chain variable domain of TCR clone 394618 (TRBV28, TRBJ2-4)
CASRARLLAKNIQYF

SEQ ID NO: 789237 - protein, 10 aa, Homo sapiens
  CDR3 for alpha chain variable domain of TCR clone 394619 (TRAV21, TRAJ43)
CAVRIGDMRF

SEQ ID NO: 789238 - protein, 16 aa, Homo sapiens
  CDR3 for beta chain variable domain of TCR clone 394619 (TRBV7-3, TRBJ2-2)
CASSLKRGTLSGELFF

SEQ ID NO: 789239 - protein, 12 aa, Homo sapiens
  CDR3 for alpha chain variable domain of TCR clone 394620 (TRAV12-1, TRAJ40)
CVVSSGTHKYIF

SEQ ID NO: 789240 - protein, 14 aa, Homo sapiens
  CDR3 for beta chain variable domain of TCR clone 394620 (TRBV20-1, TRBJ2-2)
CSAPDTANTGELFF

SEQ ID NO: 789241 - protein, 12 aa, Homo sapiens
  CDR3 for alpha chain variable domain of TCR clone 394621 (TRAV1-2, TRAJ39)
TSLLYAGNMLTF

SEQ ID NO: 789242 - protein, 16 aa, Homo sapiens
  CDR3 for beta chain variable domain of TCR clone 394621 (TRBV11-2, TRBJ2-1)
CASSLLPLSSYNEQFF

SEQ ID NO: 789243 - protein, 13 aa, Homo sapiens
  CDR3 for alpha chain variable domain of TCR clone 394622 (TRAV21, TRAJ33)
CAVAGDSNYQLIW

SEQ ID NO: 789244 - protein, 14 aa, Homo sapiens
  CDR3 for beta chain variable domain of TCR clone 394622 (TRBV28, TRBJ1-5)
CASSGQALYQPQHF

SEQ ID NO: 789245 - protein, 12 aa, Homo sapiens
  CDR3 for alpha chain variable domain of TCR clone 394623 (TRAV12-1, TRAJ31)
CVSWNNNARLMF

SEQ ID NO: 789246 - protein, 17 aa, Homo sapiens
  CDR3 for beta chain variable domain of TCR clone 394623 (TRBV11-2, TRBJ2-1)
WASSLYPPGVEYNEQFF

SEQ ID NO: 789247 - protein, 13 aa, Homo sapiens
  CDR3 for alpha chain variable domain of TCR clone 394624 (TRAV41, TRAJ54)
CAVRIQGAQTLVF

SEQ ID NO: 789248 - protein, 14 aa, Homo sapiens
  CDR3 for beta chain variable domain of TCR clone 394624 (TRBV2, TRBJ2-1)
CASRTGSSYNEQFF

SEQ ID NO: 789249 - protein, 17 aa, Homo sapiens
  CDR3 for alpha chain variable domain of TCR clone 394625 (TRAV26-1, TRAJ28)
CIVRALYSGAGNYQLTF

SEQ ID NO: 789250 - protein, 12 aa, Homo sapiens
  CDR3 for beta chain variable domain of TCR clone 394625 (TRBV12-4, TRBJ2-1)
CASRQTENEQFF

SEQ ID NO: 789251 - protein, 14 aa, Homo sapiens
  CDR3 for alpha chain variable domain of TCR clone 394626 (TRAV38-1, TRAJ27)
CAFIHNTNVGKSTF

SEQ ID NO: 789252 - protein, 12 aa, Homo sapiens
  CDR3 for beta chain variable domain of TCR clone 394626 (TRBV7-8, TRBJ2-7)
CASSLGDREQYF

SEQ ID NO: 789253 - protein, 10 aa, Homo sapiens
  CDR3 for alpha chain variable domain of TCR clone 394627 (TRAV12-3, TRAJ49)
CAMNDDPFSF

SEQ ID NO: 789254 - protein, 13 aa, Homo sapiens
  CDR3 for beta chain variable domain of TCR clone 394627 (TRBV12-4, TRBJ1-1)
CASSPGTGFEAFF

SEQ ID NO: 789255 - protein, 16 aa, Homo sapiens
  CDR3 for alpha chain variable domain of TCR clone 394628 (TRAV26-1, TRAJ23)
CIVRFHPYNQGGKLIF

SEQ ID NO: 789256 - protein, 15 aa, Homo sapiens
  CDR3 for beta chain variable domain of TCR clone 394628 (TRBV5-7, TRBJ2-7)
CASSPYFEGSYEQYF

SEQ ID NO: 789257 - protein, 13 aa, Homo sapiens
  CDR3 for alpha chain variable domain of TCR clone 394629 (TRAV8-3, TRAJ43)
CAVGSDNNNDMRF

SEQ ID NO: 789258 - protein, 12 aa, Homo sapiens
  CDR3 for beta chain variable domain of TCR clone 394629 (TRBV7-2, TRBJ1-6)
CASSLSSSHLLF

SEQ ID NO: 789259 - protein, 15 aa, Homo sapiens
  CDR3 for alpha chain variable domain of TCR clone 394630 (TRAV29/DV5, TRAJ31)
CSVLLCSKRNPRLMF

SEQ ID NO: 789260 - protein, 11 aa, Homo sapiens
  CDR3 for beta chain variable domain of TCR clone 394630 (TRBV18, TRBJ2-5)
CASSPRETQYF

SEQ ID NO: 789261 - protein, 14 aa, Homo sapiens
  CDR3 for alpha chain variable domain of TCR clone 394631 (TRAV26-1, TRAJ34)
CIVRVTYNTDKLIF

SEQ ID NO: 789262 - protein, 15 aa, Homo sapiens
  CDR3 for beta chain variable domain of TCR clone 394631 (TRBV20-1, TRBJ2-7)
CSARVPAAYLYEQYF

SEQ ID NO: 789263 - protein, 13 aa, Homo sapiens
  CDR3 for alpha chain variable domain of TCR clone 394632 (TRAV8-3, TRAJ28)
CAVCAVGSYQLTF

SEQ ID NO: 789264 - protein, 15 aa, Homo sapiens
  CDR3 for beta chain variable domain of TCR clone 394632 (TRBV19, TRBJ2-4)
CASSIGLAGANIQYF

SEQ ID NO: 789265 - protein, 14 aa, Homo sapiens
  CDR3 for alpha chain variable domain of TCR clone 394633 (TRAV12-2, TRAJ13)
CAVNPSGGYQKVTF

SEQ ID NO: 789266 - protein, 13 aa, Homo sapiens
  CDR3 for beta chain variable domain of TCR clone 394633 (TRBV24-1, TRBJ1-2)
CATSGTALDGYTF

SEQ ID NO: 789267 - protein, 14 aa, Homo sapiens
  CDR3 for alpha chain variable domain of TCR clone 394634 (TRAV12-2, TRAJ4)
CAEELSGGYNKLIF

SEQ ID NO: 789268 - protein, 13 aa, Homo sapiens
  CDR3 for beta chain variable domain of TCR clone 394634 (TRBV7-9, TRBJ1-2)
CASSLKQNYGYTF

SEQ ID NO: 789269 - protein, 11 aa, Homo sapiens
  CDR3 for alpha chain variable domain of TCR clone 394635 (TRAV13-1, TRAJ39)
CASHAGNMLTF

SEQ ID NO: 789270 - protein, 13 aa, Homo sapiens
  CDR3 for beta chain variable domain of TCR clone 394635 (TRBV27, TRBJ1-4)
CASSLMGDEKLFF

SEQ ID NO: 789271 - protein, 12 aa, Homo sapiens
  CDR3 for alpha chain variable domain of TCR clone 394636 (TRAV1-1, TRAJ39)
CAVAVVGNMLTF

SEQ ID NO: 789272 - protein, 13 aa, Homo sapiens
  CDR3 for beta chain variable domain of TCR clone 394636 (TRBV7-9, TRBJ2-1)
CASSSSNFNEQFF

SEQ ID NO: 789273 - protein, 16 aa, Homo sapiens
  CDR3 for alpha chain variable domain of TCR clone 394637 (TRAV30, TRAJ24)
CGTEIVDADSWGKFQF

SEQ ID NO: 789274 - protein, 16 aa, Homo sapiens
  CDR3 for beta chain variable domain of TCR clone 394637 (TRBV25-1, TRBJ1-5)
CASGAPTVNSNQPQHF

SEQ ID NO: 789275 - protein, 17 aa, Homo sapiens
  CDR3 for alpha chain variable domain of TCR clone 394638 (TRAV17, TRAJ52)
CATGRPSGGTSYGKLTF

SEQ ID NO: 789276 - protein, 15 aa, Homo sapiens
  CDR3 for beta chain variable domain of TCR clone 394638 (TRBV5-1, TRBJ2-1)
CASSLVANSYNEQFF

SEQ ID NO: 789277 - protein, 11 aa, Homo sapiens
  CDR3 for alpha chain variable domain of TCR clone 394639 (TRAV3, TRAJ21)
CAVGNFNKFYF

SEQ ID NO: 789278 - protein, 14 aa, Homo sapiens
  CDR3 for beta chain variable domain of TCR clone 394639 (TRBV19, TRBJ1-2)
CASSSLTGNYGYTF

SEQ ID NO: 789279 - protein, 13 aa, Homo sapiens
  CDR3 for alpha chain variable domain of TCR clone 394640 (TRAV1-1, TRAJ38)
CASNAGNNRKLIW

SEQ ID NO: 789280 - protein, 14 aa, Homo sapiens
  CDR3 for beta chain variable domain of TCR clone 394640 (TRBV15, TRBJ2-1)
CATSGVEDYNEQFS

SEQ ID NO: 789281 - protein, 14 aa, Homo sapiens
  CDR3 for alpha chain variable domain of TCR clone 394641 (TRAV20, TRAJ42)
CAGQAGGSQGNLIF

SEQ ID NO: 789282 - protein, 14 aa, Homo sapiens
  CDR3 for beta chain variable domain of TCR clone 394641 (TRBV28, TRBJ1-2)
CASRIQGANYGYTF

SEQ ID NO: 789283 - protein, 14 aa, Homo sapiens
  CDR3 for alpha chain variable domain of TCR clone 394642 (TRAV12-1, TRAJ26)
YVVKGSNYGQNFVF

SEQ ID NO: 789284 - protein, 15 aa, Homo sapiens
  CDR3 for beta chain variable domain of TCR clone 394642 (TRBV7-9, TRBJ2-5)
CASSFKAGREETQYF

SEQ ID NO: 789285 - protein, 18 aa, Homo sapiens
  CDR3 for alpha chain variable domain of TCR clone 394643 (TRAV12-3, TRAJ52)
CAMSVGGAGGTSYEKLTF

SEQ ID NO: 789286 - protein, 17 aa, Homo sapiens
  CDR3 for beta chain variable domain of TCR clone 394643 (TRBV13, TRBJ2-3)
CASSLSRVAGGRNTQYF

SEQ ID NO: 789287 - protein, 15 aa, Homo sapiens
  CDR3 for alpha chain variable domain of TCR clone 394644 (TRAV3, TRAJ4)
CAVRDGTGGYNKMIF

SEQ ID NO: 789288 - protein, 13 aa, Homo sapiens
  CDR3 for beta chain variable domain of TCR clone 394644 (TRBV12-5, TRBJ1-2)
CASGVRTGNGYTF

SEQ ID NO: 789289 - protein, 14 aa, Homo sapiens
  CDR3 for alpha chain variable domain of TCR clone 394645 (TRAV1-2, TRAJ16)
CAVNRFSDGQKLLF

SEQ ID NO: 789290 - protein, 17 aa, Homo sapiens
  CDR3 for beta chain variable domain of TCR clone 394645 (TRBV7-8, TRBJ2-6)
CASSAGTGGAGANVLIF

SEQ ID NO: 789291 - protein, 14 aa, Homo sapiens
  CDR3 for alpha chain variable domain of TCR clone 394646 (TRAV1-2, TRAJ8)
CAVGEDTGFQTLVF

SEQ ID NO: 789292 - protein, 15 aa, Homo sapiens
  CDR3 for beta chain variable domain of TCR clone 394646 (TRBV6-3, TRBJ2-7)
CASSSPGTVFYEQYF

SEQ ID NO: 789293 - protein, 17 aa, Homo sapiens
  CDR3 for alpha chain variable domain of TCR clone 394647 (TRAV3, TRAJ6)
CAVRDGPRAGGSYIPIL

SEQ ID NO: 789294 - protein, 13 aa, Homo sapiens
  CDR3 for beta chain variable domain of TCR clone 394647 (TRBV20-1, TRBJ1-6)
CSAPLGVGSPLHF

SEQ ID NO: 789295 - protein, 13 aa, Homo sapiens
  CDR3 for alpha chain variable domain of TCR clone 394648 (TRAV17, TRAJ9)
CATAIAGGFKTIF

SEQ ID NO: 789296 - protein, 16 aa, Homo sapiens
  CDR3 for beta chain variable domain of TCR clone 394648 (TRBV15, TRBJ2-1)
CATSRNLAGGYNEQFF

SEQ ID NO: 789297 - protein, 12 aa, Homo sapiens
  CDR3 for alpha chain variable domain of TCR clone 394649 (TRAV12-3, TRAJ17)
CAMALTGNKLTF

SEQ ID NO: 789298 - protein, 14 aa, Homo sapiens
  CDR3 for beta chain variable domain of TCR clone 394649 (TRBV7-2, TRBJ1-2)
SASSSQGAHYGYTF

SEQ ID NO: 789299 - protein, 12 aa, Homo sapiens
  CDR3 for alpha chain variable domain of TCR clone 394650 (TRAV36/DV7, TRAJ54)
CAVVRGAQKLVL

SEQ ID NO: 789300 - protein, 16 aa, Homo sapiens
  CDR3 for beta chain variable domain of TCR clone 394650 (TRBV19, TRBJ2-4)
CATGGLAGGTKNIQYF

SEQ ID NO: 789301 - protein, 14 aa, Homo sapiens
  CDR3 for alpha chain variable domain of TCR clone 394651 (TRAV12-2, TRAJ13)
CAGKKTGCYQKVTF

SEQ ID NO: 789302 - protein, 15 aa, Homo sapiens
  CDR3 for beta chain variable domain of TCR clone 394651 (TRBV27, TRBJ2-1)
CASSNGGGSSNEQFF

SEQ ID NO: 789303 - protein, 14 aa, Homo sapiens
  CDR3 for alpha chain variable domain of TCR clone 394652 (TRAV21, TRAJ48)
CAVRSNFGNEKLTF

SEQ ID NO: 789304 - protein, 16 aa, Homo sapiens
  CDR3 for beta chain variable domain of TCR clone 394652 (TRBV12-5, TRBJ2-5)
CASGPRTSGNQETQYF

SEQ ID NO: 789305 - protein, 13 aa, Homo sapiens
  CDR3 for alpha chain variable domain of TCR clone 394653 (TRAV20, TRAJ37)
CAGCTSNTGKLIF

SEQ ID NO: 789306 - protein, 15 aa, Homo sapiens
  CDR3 for beta chain variable domain of TCR clone 394653 (TRBV7-2, TRBJ2-1)
CASSFQADEYNEQFF

SEQ ID NO: 789307 - protein, 14 aa, Homo sapiens
  CDR3 for alpha chain variable domain of TCR clone 394654 (TRAV23/DV6, TRAJ4)
CTAPSSGGYNKLIF

SEQ ID NO: 789308 - protein, 16 aa, Homo sapiens
  CDR3 for beta chain variable domain of TCR clone 394654 (TRBV19, TRBJ1-1)
CASRFGGPVTGTEAFF

SEQ ID NO: 789309 - protein, 14 aa, Homo sapiens
  CDR3 for alpha chain variable domain of TCR clone 394655 (TRAV12-2, TRAJ13)
CAVKNTGGYQKVTF

SEQ ID NO: 789310 - protein, 15 aa, Homo sapiens
  CDR3 for beta chain variable domain of TCR clone 394655 (TRBV27, TRBJ2-1)
CASSNGGVSSNEQFF

SEQ ID NO: 789311 - protein, 15 aa, Homo sapiens
  CDR3 for alpha chain variable domain of TCR clone 394656 (TRAV3, TRAJ4)
CAVRDGTGGYNKLIF

SEQ ID NO: 789312 - protein, 15 aa, Homo sapiens
  CDR3 for beta chain variable domain of TCR clone 394656 (TRBV19, TRBJ1-2)
CASSVGQVLNYGDTF

SEQ ID NO: 789313 - protein, 14 aa, Homo sapiens
  CDR3 for alpha chain variable domain of TCR clone 394657 (TRAV12-3, TRAJ42)
CAMNYGGSHGNLLF

SEQ ID NO: 789314 - protein, 16 aa, Homo sapiens
  CDR3 for beta chain variable domain of TCR clone 394657 (TRBV12-4, TRBJ1-5)
CASSSGPRGSNQPQHF

SEQ ID NO: 789315 - protein, 15 aa, Homo sapiens
  CDR3 for alpha chain variable domain of TCR clone 394658 (TRAV8-3, TRAJ45)
CASSYSGGGADGLTF

SEQ ID NO: 789316 - protein, 12 aa, Homo sapiens
  CDR3 for beta chain variable domain of TCR clone 394658 (TRBV7-9, TRBJ2-3)
CASSFITDTQYF

SEQ ID NO: 789317 - protein, 12 aa, Homo sapiens
  CDR3 for alpha chain variable domain of TCR clone 394659 (TRAV2, TRAJ31)
CAVEDNNARLLF

SEQ ID NO: 789318 - protein, 16 aa, Homo sapiens
  CDR3 for beta chain variable domain of TCR clone 394659 (TRBV10-3, TRBJ2-1)
CAISGVGDGGGGEQFF

SEQ ID NO: 789319 - protein, 14 aa, Homo sapiens
  CDR3 for alpha chain variable domain of TCR clone 394660 (TRAV1-2, TRAJ8)
CAVREDTGFQKLVF

SEQ ID NO: 789320 - protein, 15 aa, Homo sapiens
  CDR3 for beta chain variable domain of TCR clone 394660 (TRBV2, TRBJ2-7)
RASSEGLARSYEQYF

SEQ ID NO: 789321 - protein, 12 aa, Homo sapiens
  CDR3 for alpha chain variable domain of TCR clone 394661 (TRAV9-2, TRAJ9)
CAMNTGGFKTIF

SEQ ID NO: 789322 - protein, 13 aa, Homo sapiens
  CDR3 for beta chain variable domain of TCR clone 394661 (TRBV24-1, TRBJ2-1)
CATSAGPYNEQFF

SEQ ID NO: 789323 - protein, 13 aa, Homo sapiens
  CDR3 for alpha chain variable domain of TCR clone 394662 (TRAV20, TRAJ48)
CAVQGVGNEKLTF

SEQ ID NO: 789324 - protein, 14 aa, Homo sapiens
  CDR3 for beta chain variable domain of TCR clone 394662 (TRBV2, TRBJ2-2)
CASRQPGLAGGEHR

SEQ ID NO: 789325 - protein, 15 aa, Homo sapiens
  CDR3 for alpha chain variable domain of TCR clone 394663 (TRAV23/DV6, TRAJ18)
CAARNRGSTLGRLYF

SEQ ID NO: 789326 - protein, 13 aa, Homo sapiens
  CDR3 for beta chain variable domain of TCR clone 394663 (TRBV7-2, TRBJ2-7)
CASSAPSGSEQYF

SEQ ID NO: 789327 - protein, 12 aa, Homo sapiens
  CDR3 for alpha chain variable domain of TCR clone 394664 (TRAV27, TRAJ35)
CAGADFGNVLHC

SEQ ID NO: 789328 - protein, 14 aa, Homo sapiens
  CDR3 for beta chain variable domain of TCR clone 394664 (TRBV20-1, TRBJ1-1)
CSAQTRIGGTEAFF

SEQ ID NO: 789329 - protein, 12 aa, Homo sapiens
  CDR3 for alpha chain variable domain of TCR clone 394665 (TRAV21, TRAJ8)
CAVNTGFQKLLF

SEQ ID NO: 789330 - protein, 13 aa, Homo sapiens
  CDR3 for beta chain variable domain of TCR clone 394665 (TRBV6-3, TRBJ2-1)
CASSYDNYNEQFF

SEQ ID NO: 789331 - protein, 14 aa, Homo sapiens
  CDR3 for alpha chain variable domain of TCR clone 394666 (TRAV12-2, TRAJ45)
CAVNKGGGADGLAF

SEQ ID NO: 789332 - protein, 15 aa, Homo sapiens
  CDR3 for beta chain variable domain of TCR clone 394666 (TRBV9, TRBJ1-6)
CASSVAGTGDSPLHF

SEQ ID NO: 789333 - protein, 15 aa, Homo sapiens
  CDR3 for alpha chain variable domain of TCR clone 394667 (TRAV23/DV6, TRAJ13)
CAAWPGGGGYQKFTF

SEQ ID NO: 789334 - protein, 17 aa, Homo sapiens
  CDR3 for beta chain variable domain of TCR clone 394667 (TRBV19, TRBJ2-7)
CASSISFYDSYPYEQYF

SEQ ID NO: 789335 - protein, 16 aa, Homo sapiens
  CDR3 for alpha chain variable domain of TCR clone 394668 (TRAV30, TRAJ24)
CGTEIVGADSWGKFQF

SEQ ID NO: 789336 - protein, 15 aa, Homo sapiens
  CDR3 for beta chain variable domain of TCR clone 394668 (TRBV20-1, TRBJ2-7)
CSARDRVSGMDEQYF

SEQ ID NO: 789337 - protein, 15 aa, Homo sapiens
  CDR3 for alpha chain variable domain of TCR clone 394669 (TRAV8-3, TRAJ45)
CASSYSGGGADGLTF

SEQ ID NO: 789338 - protein, 13 aa, Homo sapiens
  CDR3 for beta chain variable domain of TCR clone 394669 (TRBV20-1, TRBJ2-2)
CSASAAGTGELFV

SEQ ID NO: 789339 - protein, 14 aa, Homo sapiens
  CDR3 for alpha chain variable domain of TCR clone 394670 (TRAV38-1, TRAJ45)
CASHSGGGADGLTF

SEQ ID NO: 789340 - protein, 16 aa, Homo sapiens
  CDR3 for beta chain variable domain of TCR clone 394670 (TRBV27, TRBJ2-2)
CASSFWGLVRTGELFF

SEQ ID NO: 789341 - protein, 19 aa, Homo sapiens
  CDR3 for alpha chain variable domain of TCR clone 394671 (TRAV2, TRAJ20)
ILQVREADAAVYRDCKLSF

SEQ ID NO: 789342 - protein, 16 aa, Homo sapiens
  CDR3 for beta chain variable domain of TCR clone 394671 (TRBV7-3, TRBJ2-2)
CASSLERGTLSGELFF

SEQ ID NO: 789343 - protein, 13 aa, Homo sapiens
  CDR3 for alpha chain variable domain of TCR clone 394672 (TRAV38-2/DV8, TRAJ45)
CAYVGGGADGLTF

SEQ ID NO: 789344 - protein, 13 aa, Homo sapiens
  CDR3 for beta chain variable domain of TCR clone 394672 (TRBV29-1, TRBJ2-1)
CSVEGGRVNEQFF

SEQ ID NO: 789345 - protein, 14 aa, Homo sapiens
  CDR3 for alpha chain variable domain of TCR clone 394673 (TRAV12-2, TRAJ13)
CAVKKTGGYQKVTF

SEQ ID NO: 789346 - protein, 13 aa, Homo sapiens
  CDR3 for beta chain variable domain of TCR clone 394673 (TRBV20-1, TRBJ1-1)
GSARGGGNTEAFF

SEQ ID NO: 789347 - protein, 17 aa, Homo sapiens
  CDR3 for alpha chain variable domain of TCR clone 394674 (TRAV26-2, TRAJ42)
CILRDVGYGGSQGNLFF

SEQ ID NO: 789348 - protein, 16 aa, Homo sapiens
  CDR3 for beta chain variable domain of TCR clone 394674 (TRBV12-4, TRBJ2-7)
CASSLIGGTGTYEQYF

SEQ ID NO: 789349 - protein, 14 aa, Homo sapiens
  CDR3 for alpha chain variable domain of TCR clone 394675 (TRAV25, TRAJ48)
CAGPGGFGNEKLTF

SEQ ID NO: 789350 - protein, 14 aa, Homo sapiens
  CDR3 for beta chain variable domain of TCR clone 394675 (TRBV18, TRBJ2-3)
CASSRDRGTDTQYF

SEQ ID NO: 789351 - protein, 13 aa, Homo sapiens
  CDR3 for alpha chain variable domain of TCR clone 394676 (TRAV12-3, TRAJ13)
CAMRSGGYQKVTF

SEQ ID NO: 789352 - protein, 14 aa, Homo sapiens
  CDR3 for beta chain variable domain of TCR clone 394676 (TRBV2, TRBJ2-1)
CASRTGSSYNEQFF

SEQ ID NO: 789353 - protein, 12 aa, Homo sapiens
  CDR3 for alpha chain variable domain of TCR clone 394677 (TRAV13-1, TRAJ49)
CAASPMGNQFYF

SEQ ID NO: 789354 - protein, 17 aa, Homo sapiens
  CDR3 for beta chain variable domain of TCR clone 394677 (TRBV3-1, TRBJ2-5)
CASSNWGGTSGQETQYF

SEQ ID NO: 789355 - protein, 13 aa, Homo sapiens
  CDR3 for alpha chain variable domain of TCR clone 394678 (TRAV38-1, TRAJ42)
CARWGGSQGNLIF

SEQ ID NO: 789356 - protein, 16 aa, Homo sapiens
  CDR3 for beta chain variable domain of TCR clone 394678 (TRBV4-1, TRBJ2-3)
CASSQRAGGLTDTQYF

SEQ ID NO: 789357 - protein, 15 aa, Homo sapiens
  CDR3 for alpha chain variable domain of TCR clone 394679 (TRAV12-2, TRAJ53)
CAVNGGGGSNYKLTC

SEQ ID NO: 789358 - protein, 17 aa, Homo sapiens
  CDR3 for beta chain variable domain of TCR clone 394679 (TRBV7-3, TRBJ2-3)
CASSLMKRMRGADTQYF

SEQ ID NO: 789359 - protein, 12 aa, Homo sapiens
  CDR3 for alpha chain variable domain of TCR clone 394680 (TRAV12-3, TRAJ33)
CAFMDSNYQLIW

SEQ ID NO: 789360 - protein, 12 aa, Homo sapiens
  CDR3 for beta chain variable domain of TCR clone 394680 (TRBV2, TRBJ2-1)
CAYGPPGNEQFF

SEQ ID NO: 789361 - protein, 15 aa, Homo sapiens
  CDR3 for alpha chain variable domain of TCR clone 394681 (TRAV8-6, TRAJ10)
GAVSDQAGGGNKLTF

SEQ ID NO: 789362 - protein, 16 aa, Homo sapiens
  CDR3 for beta chain variable domain of TCR clone 394681 (TRBV27, TRBJ2-7)
CASSSERRDSAYEQYF

SEQ ID NO: 789363 - protein, 13 aa, Homo sapiens
  CDR3 for alpha chain variable domain of TCR clone 394682 (TRAV13-2, TRAJ21)
RAENVGQLQQILL

SEQ ID NO: 789364 - protein, 16 aa, Homo sapiens
  CDR3 for beta chain variable domain of TCR clone 394682 (TRBV20-1, TRBJ1-2)
CSASMGQGVANYGYTF

SEQ ID NO: 789365 - protein, 16 aa, Homo sapiens
  CDR3 for alpha chain variable domain of TCR clone 394683 (TRAV12-3, TRAJ53)
CAMSPGSGGSNHKLTF

SEQ ID NO: 789366 - protein, 15 aa, Homo sapiens
  CDR3 for beta chain variable domain of TCR clone 394683 (TRBV25-1, TRBJ1-4)
CASSKRIATNEKLFF

SEQ ID NO: 789367 - protein, 14 aa, Homo sapiens
  CDR3 for alpha chain variable domain of TCR clone 394684 (TRAV8-3, TRAJ9)
CAVVYNTGGFKTNF

SEQ ID NO: 789368 - protein, 16 aa, Homo sapiens
  CDR3 for beta chain variable domain of TCR clone 394684 (TRBV7-3, TRBJ2-2)
CASSLKRGTLSGELFF

SEQ ID NO: 789369 - protein, 16 aa, Homo sapiens
  CDR3 for alpha chain variable domain of TCR clone 394685 (TRAV3, TRAJ28)
CAVLPRSGAGSYQLTF

SEQ ID NO: 789370 - protein, 19 aa, Homo sapiens
  CDR3 for beta chain variable domain of TCR clone 394685 (TRBV23-1, TRBJ2-7)
TVSLRQQSIQENGFHEQYF

SEQ ID NO: 789371 - protein, 16 aa, Homo sapiens
  CDR3 for alpha chain variable domain of TCR clone 394686 (TRAV8-3, TRAJ10)
CAVGPILTGGGNKLTF

SEQ ID NO: 789372 - protein, 15 aa, Homo sapiens
  CDR3 for beta chain variable domain of TCR clone 394686 (TRBV11-1, TRBJ2-7)
CASSLNYGASYEQYF

SEQ ID NO: 789373 - protein, 14 aa, Homo sapiens
  CDR3 for alpha chain variable domain of TCR clone 394687 (TRAV17, TRAJ16)
CATADFSDGQKLLF

SEQ ID NO: 789374 - protein, 15 aa, Homo sapiens
  CDR3 for beta chain variable domain of TCR clone 394687 (TRBV6-5, TRBJ1-4)
CASSSVGGAGEKLFF

SEQ ID NO: 789375 - protein, 13 aa, Homo sapiens
  CDR3 for alpha chain variable domain of TCR clone 394688 (TRAV12-3, TRAJ49)
CAMIPTGWAQFYF

SEQ ID NO: 789376 - protein, 15 aa, Homo sapiens
  CDR3 for beta chain variable domain of TCR clone 394688 (TRBV19, TRBJ1-1)
CASTSGQIQNTEAFF

SEQ ID NO: 789377 - protein, 12 aa, Homo sapiens
  CDR3 for alpha chain variable domain of TCR clone 394689 (TRAV35, TRAJ39)
LAPNNAGNMLTF

SEQ ID NO: 789378 - protein, 19 aa, Homo sapiens
  CDR3 for beta chain variable domain of TCR clone 394689 (TRBV28, TRBJ2-1)
CASSFSIRGSGRTRYEQFF

SEQ ID NO: 789379 - protein, 15 aa, Homo sapiens
  CDR3 for alpha chain variable domain of TCR clone 394690 (TRAV9-2, TRAJ10)
CALKVLTGGGNKLTF

SEQ ID NO: 789380 - protein, 16 aa, Homo sapiens
  CDR3 for beta chain variable domain of TCR clone 394690 (TRBV20-1, TRBJ2-5)
AAVLGGLAGGGETQYF

SEQ ID NO: 789381 - protein, 12 aa, Homo sapiens
  CDR3 for alpha chain variable domain of TCR clone 394691 (TRAV26-2, TRAJ48)
CILRKVNEKLTF

SEQ ID NO: 789382 - protein, 14 aa, Homo sapiens
  CDR3 for beta chain variable domain of TCR clone 394691 (TRBV28, TRBJ2-7)
CASSTLRGRFEQYF

SEQ ID NO: 789383 - protein, 15 aa, Homo sapiens
  CDR3 for alpha chain variable domain of TCR clone 394692 (TRAV8-3, TRAJ45)
CASSYSGGGADGLTF

SEQ ID NO: 789384 - protein, 13 aa, Homo sapiens
  CDR3 for beta chain variable domain of TCR clone 394692 (TRBV10-3, TRBJ2-7)
CASRLTVNYEQYF

SEQ ID NO: 789385 - protein, 13 aa, Homo sapiens
  CDR3 for alpha chain variable domain of TCR clone 394693 (TRAV21, TRAJ36)
CAVIKTGANNLFF

SEQ ID NO: 789386 - protein, 15 aa, Homo sapiens
  CDR3 for beta chain variable domain of TCR clone 394693 (TRBV19, TRBJ1-2)
CASSVGQVLNYGYAF

SEQ ID NO: 789387 - protein, 10 aa, Homo sapiens
  CDR3 for alpha chain variable domain of TCR clone 394694 (TRAV13-1, TRAJ27)
CAPLARQINL

SEQ ID NO: 789388 - protein, 18 aa, Homo sapiens
  CDR3 for beta chain variable domain of TCR clone 394694 (TRBV18, TRBJ2-3)
CASSYTSGAAGGTDTQYF

SEQ ID NO: 789389 - protein, 16 aa, Homo sapiens
  CDR3 for alpha chain variable domain of TCR clone 394695 (TRAV3, TRAJ21)
CAVRDRSASTNFTLDL

SEQ ID NO: 789390 - protein, 19 aa, Homo sapiens
  CDR3 for beta chain variable domain of TCR clone 394695 (TRBV5-1, TRBJ2-3)
CASSLWLAGGITTTDTQYF

SEQ ID NO: 789391 - protein, 16 aa, Homo sapiens
  CDR3 for alpha chain variable domain of TCR clone 394696 (TRAV3, TRAJ28)
CAVLPRSGAGSYQLTF

SEQ ID NO: 789392 - protein, 17 aa, Homo sapiens
  CDR3 for beta chain variable domain of TCR clone 394696 (TRBV12-4, TRBJ2-5)
CASRLAVQETVLRARHA

SEQ ID NO: 789393 - protein, 12 aa, Homo sapiens
  CDR3 for alpha chain variable domain of TCR clone 394697 (TRAV12-2, TRAJ47)
CAVAEYGNKLVF

SEQ ID NO: 789394 - protein, 13 aa, Homo sapiens
  CDR3 for beta chain variable domain of TCR clone 394697 (TRBV29-1, TRBJ2-2)
CSVYREDTGELFF

SEQ ID NO: 789395 - protein, 15 aa, Homo sapiens
  CDR3 for alpha chain variable domain of TCR clone 394698 (TRAV25, TRAJ52)
CAGTSGGTSYGKLTF

SEQ ID NO: 789396 - protein, 13 aa, Homo sapiens
  CDR3 for beta chain variable domain of TCR clone 394698 (TRBV6-5, TRBJ2-5)
CSSSPQGGETQYF

SEQ ID NO: 789397 - protein, 13 aa, Homo sapiens
  CDR3 for alpha chain variable domain of TCR clone 394699 (TRAV25, TRAJ10)
CAGRTGGGNKLTL

SEQ ID NO: 789398 - protein, 15 aa, Homo sapiens
  CDR3 for beta chain variable domain of TCR clone 394699 (TRBV19, TRBJ2-1)
CASSSPGVPPDEQFF

SEQ ID NO: 789399 - protein, 15 aa, Homo sapiens
  CDR3 for alpha chain variable domain of TCR clone 394700 (TRAV8-1, TRAJ6)
CAVNAGAGGSYIPTF

SEQ ID NO: 789400 - protein, 14 aa, Homo sapiens
  CDR3 for beta chain variable domain of TCR clone 394700 (TRBV25-1, TRBJ1-6)
CASSLSADISPLRF

SEQ ID NO: 789401 - protein, 15 aa, Homo sapiens
  CDR3 for alpha chain variable domain of TCR clone 394701 (TRAV17, TRAJ53)
CATGNSGGSNYKLTF

SEQ ID NO: 789402 - protein, 16 aa, Homo sapiens
  CDR3 for beta chain variable domain of TCR clone 394701 (TRBV5-1, TRBJ2-3)
CASSSGRQDAPDTQYF

SEQ ID NO: 789403 - protein, 12 aa, Homo sapiens
  CDR3 for alpha chain variable domain of TCR clone 394702 (TRAV3, TRAJ20)
CAVRDGHYKLSF

SEQ ID NO: 789404 - protein, 14 aa, Homo sapiens
  CDR3 for beta chain variable domain of TCR clone 394702 (TRBV7-8, TRBJ2-3)
CASSLEAGTDTQYF

SEQ ID NO: 789405 - protein, 13 aa, Homo sapiens
  CDR3 for alpha chain variable domain of TCR clone 394703 (TRAV12-2, TRAJ6)
CAVNVSRKLHTYI

SEQ ID NO: 789406 - protein, 13 aa, Homo sapiens
  CDR3 for beta chain variable domain of TCR clone 394703 (TRBV15, TRBJ2-5)
CATSQIGEETQYF

SEQ ID NO: 789407 - protein, 12 aa, Homo sapiens
  CDR3 for alpha chain variable domain of TCR clone 394704 (TRAV2, TRAJ10)
CASTGGRNKLTF

SEQ ID NO: 789408 - protein, 20 aa, Homo sapiens
  CDR3 for beta chain variable domain of TCR clone 394704 (TRBV7-8, TRBJ2-2)
CASSHLFPGPTIHITGELFF

SEQ ID NO: 789409 - protein, 15 aa, Homo sapiens
  CDR3 for alpha chain variable domain of TCR clone 394705 (TRAV13-1, TRAJ52)
CAATSPRTSYGKLTF

SEQ ID NO: 789410 - protein, 17 aa, Homo sapiens
  CDR3 for beta chain variable domain of TCR clone 394705 (TRBV7-3, TRBJ2-3)
CASSLMKRMRGADTQYL

SEQ ID NO: 789411 - protein, 16 aa, Homo sapiens
  CDR3 for alpha chain variable domain of TCR clone 394706 (TRAV20, TRAJ26)
CAVQHRRDNYGQNFVF

SEQ ID NO: 789412 - protein, 16 aa, Homo sapiens
  CDR3 for beta chain variable domain of TCR clone 394706 (TRBV12-5, TRBJ2-5)
CASGPRTSGNQETQYF

SEQ ID NO: 789413 - protein, 15 aa, Homo sapiens
  CDR3 for alpha chain variable domain of TCR clone 394707 (TRAV8-3, TRAJ11)
CAVGLLNSGYSTLTF

SEQ ID NO: 789414 - protein, 11 aa, Homo sapiens
  CDR3 for beta chain variable domain of TCR clone 394707 (TRBV7-8, TRBJ2-7)
CASSLSLEQYF

SEQ ID NO: 789415 - protein, 15 aa, Homo sapiens
  CDR3 for alpha chain variable domain of TCR clone 394708 (TRAV12-1, TRAJ10)
CVVNKLTGGGNKLTF

SEQ ID NO: 789416 - protein, 14 aa, Homo sapiens
  CDR3 for beta chain variable domain of TCR clone 394708 (TRBV4-2, TRBJ2-1)
CASGLDRAYNEQFF

SEQ ID NO: 789417 - protein, 12 aa, Homo sapiens
  CDR3 for alpha chain variable domain of TCR clone 394709 (TRAV16, TRAJ27)
CALSHQCRQINL

SEQ ID NO: 789418 - protein, 14 aa, Homo sapiens
  CDR3 for beta chain variable domain of TCR clone 394709 (TRBV11-2, TRBJ1-5)
CASSLDRGRQPQHF

SEQ ID NO: 789419 - protein, 13 aa, Homo sapiens
  CDR3 for alpha chain variable domain of TCR clone 394710 (TRAV8-1, TRAJ39)
CAVNACNEGNMLT

SEQ ID NO: 789420 - protein, 13 aa, Homo sapiens
  CDR3 for beta chain variable domain of TCR clone 394710 (TRBV12-4, TRBJ2-5)
CASSPGTEETQYF

SEQ ID NO: 789421 - protein, 15 aa, Homo sapiens
  CDR3 for alpha chain variable domain of TCR clone 394711 (TRAV26-2, TRAJ28)
CILVESGAGSHQLTF

SEQ ID NO: 789422 - protein, 14 aa, Homo sapiens
  CDR3 for beta chain variable domain of TCR clone 394711 (TRBV6-1, TRBJ1-3)
CASVQGGGGNTIYF

SEQ ID NO: 789423 - protein, 15 aa, Homo sapiens
  CDR3 for alpha chain variable domain of TCR clone 394712 (TRAV8-3, TRAJ45)
CASSYSGGGADGLTF

SEQ ID NO: 789424 - protein, 14 aa, Homo sapiens
  CDR3 for beta chain variable domain of TCR clone 394712 (TRBV11-2, TRBJ1-2)
CASSLGTANYGYTF

SEQ ID NO: 789425 - protein, 17 aa, Homo sapiens
  CDR3 for alpha chain variable domain of TCR clone 394713 (TRAV12-3, TRAJ6)
CAMSARGGAGGSYTPTF

SEQ ID NO: 789426 - protein, 12 aa, Homo sapiens
  CDR3 for beta chain variable domain of TCR clone 394713 (TRBV12-4, TRBJ2-3)
CASSTLPDTQYF

SEQ ID NO: 789427 - protein, 15 aa, Homo sapiens
  CDR3 for alpha chain variable domain of TCR clone 394714 (TRAV2, TRAJ15)
CAVEDRNQAGTALIF

SEQ ID NO: 789428 - protein, 13 aa, Homo sapiens
  CDR3 for beta chain variable domain of TCR clone 394714 (TRBV10-3, TRBJ2-7)
CASKRAVNYEQYF

SEQ ID NO: 789429 - protein, 18 aa, Homo sapiens
  CDR3 for alpha chain variable domain of TCR clone 394715 (TRAV12-3, TRAJ52)
CAMSVGGAGGTSYGKLTL

SEQ ID NO: 789430 - protein, 15 aa, Homo sapiens
  CDR3 for beta chain variable domain of TCR clone 394715 (TRBV27, TRBJ1-6)
CASSFDRGLGSTLHF

SEQ ID NO: 789431 - protein, 16 aa, Homo sapiens
  CDR3 for alpha chain variable domain of TCR clone 394716 (TRAV8-3, TRAJ13)
CAVGAYPSGGYQKVTF

SEQ ID NO: 789432 - protein, 13 aa, Homo sapiens
  CDR3 for beta chain variable domain of TCR clone 394716 (TRBV12-4, TRBJ1-2)
CASSLRQGKGYTF

SEQ ID NO: 789433 - protein, 15 aa, Homo sapiens
  CDR3 for alpha chain variable domain of TCR clone 394717 (TRAV13-1, TRAJ45)
CAASRSGGGADGLTF

SEQ ID NO: 789434 - protein, 14 aa, Homo sapiens
  CDR3 for beta chain variable domain of TCR clone 394717 (TRBV12-4, TRBJ1-2)
CASSFVGTAYGYTF

SEQ ID NO: 789435 - protein, 15 aa, Homo sapiens
  CDR3 for alpha chain variable domain of TCR clone 394718 (TRAV35, TRAJ23)
CAGRLGNNQGGKLIF

SEQ ID NO: 789436 - protein, 14 aa, Homo sapiens
  CDR3 for beta chain variable domain of TCR clone 394718 (TRBV7-9, TRBJ1-1)
CASTPLQSYTEAFF

SEQ ID NO: 789437 - protein, 16 aa, Homo sapiens
  CDR3 for alpha chain variable domain of TCR clone 394719 (TRAV3, TRAJ21)
CAVRDIERGNFNKFYF

SEQ ID NO: 789438 - protein, 17 aa, Homo sapiens
  CDR3 for beta chain variable domain of TCR clone 394719 (TRBV7-9, TRBJ2-6)
CASSFGAGYSGANVLTF

SEQ ID NO: 789439 - protein, 15 aa, Homo sapiens
  CDR3 for alpha chain variable domain of TCR clone 394720 (TRAV12-3, TRAJ6)
CAMSATIGGSYIPTF

SEQ ID NO: 789440 - protein, 14 aa, Homo sapiens
  CDR3 for beta chain variable domain of TCR clone 394720 (TRBV7-2, TRBJ2-5)
CASSPRGSSETQYF

SEQ ID NO: 789441 - protein, 15 aa, Homo sapiens
  CDR3 for alpha chain variable domain of TCR clone 394721 (TRAV29/DV5, TRAJ24)
CAARGATDSWGKFQF

SEQ ID NO: 789442 - protein, 12 aa, Homo sapiens
  CDR3 for beta chain variable domain of TCR clone 394721 (TRBV11-2, TRBJ2-2)
CASSLPTGELFF

SEQ ID NO: 789443 - protein, 14 aa, Homo sapiens
  CDR3 for alpha chain variable domain of TCR clone 394722 (TRAV8-3, TRAJ39)
CAVGANNAGNMLTF

SEQ ID NO: 789444 - protein, 17 aa, Homo sapiens
  CDR3 for beta chain variable domain of TCR clone 394722 (TRBV20-1, TRBJ2-1)
CSASSSGLAGSYNEQFF

SEQ ID NO: 789445 - protein, 13 aa, Homo sapiens
  CDR3 for alpha chain variable domain of TCR clone 394723 (TRAV29/DV5, TRAJ31)
CAASRNNNARLMF

SEQ ID NO: 789446 - protein, 18 aa, Homo sapiens
  CDR3 for beta chain variable domain of TCR clone 394723 (TRBV7-9, TRBJ2-7)
CASSLTTSGSRTCYEQYF

SEQ ID NO: 789447 - protein, 16 aa, Homo sapiens
  CDR3 for alpha chain variable domain of TCR clone 394724 (TRAV12-2, TRAJ47)
CAVNREKEEYGNKLVF

SEQ ID NO: 789448 - protein, 13 aa, Homo sapiens
  CDR3 for beta chain variable domain of TCR clone 394724 (TRBV7-2, TRBJ2-4)
CASSREHANIQYF

SEQ ID NO: 789449 - protein, 14 aa, Homo sapiens
  CDR3 for alpha chain variable domain of TCR clone 394725 (TRAV13-1, TRAJ44)
CAAKATCTASKLTF

SEQ ID NO: 789450 - protein, 22 aa, Homo sapiens
  CDR3 for beta chain variable domain of TCR clone 394725 (TRBV19, TRBJ2-1)
CASSVRDRVTGISGRIYNEQFF

SEQ ID NO: 789451 - protein, 13 aa, Homo sapiens
  CDR3 for alpha chain variable domain of TCR clone 394726 (TRAV12-1, TRAJ26)
CVVRRDYGQNFVF

SEQ ID NO: 789452 - protein, 14 aa, Homo sapiens
  CDR3 for beta chain variable domain of TCR clone 394726 (TRBV6-3, TRBJ1-1)
CSSRYTGESTEAFF

SEQ ID NO: 789453 - protein, 15 aa, Homo sapiens
  CDR3 for alpha chain variable domain of TCR clone 394727 (TRAV12-3, TRAJ27)
CAMRAYNTNAGKSTF

SEQ ID NO: 789454 - protein, 13 aa, Homo sapiens
  CDR3 for beta chain variable domain of TCR clone 394727 (TRBV2, TRBJ1-5)
CATAGPGNQPQHF

SEQ ID NO: 789455 - protein, 11 aa, Homo sapiens
  CDR3 for alpha chain variable domain of TCR clone 394728 (TRAV1-1, TRAJ5)
CAVRVRRALTF

SEQ ID NO: 789456 - protein, 18 aa, Homo sapiens
  CDR3 for beta chain variable domain of TCR clone 394728 (TRBV12-4, TRBJ1-2)
CASSPNPGQAEPYYGYTF

SEQ ID NO: 789457 - protein, 13 aa, Homo sapiens
  CDR3 for alpha chain variable domain of TCR clone 394729 (TRAV21, TRAJ15)
FAVANQAGTALIF

SEQ ID NO: 789458 - protein, 14 aa, Homo sapiens
  CDR3 for beta chain variable domain of TCR clone 394729 (TRBV27, TRBJ2-2)
CASSLGAATGELFF

SEQ ID NO: 789459 - protein, 14 aa, Homo sapiens
  CDR3 for alpha chain variable domain of TCR clone 394730 (TRAV1-2, TRAJ8)
CAVREDTGFQKLVF

SEQ ID NO: 789460 - protein, 15 aa, Homo sapiens
  CDR3 for beta chain variable domain of TCR clone 394730 (TRBV18, TRBJ1-1)
CASSPRQGENTEAFF

SEQ ID NO: 789461 - protein, 12 aa, Homo sapiens
  CDR3 for alpha chain variable domain of TCR clone 394731 (TRAV1-1, TRAJ8)
RAGGTGFQKLVF

SEQ ID NO: 789462 - protein, 13 aa, Homo sapiens
  CDR3 for beta chain variable domain of TCR clone 394731 (TRBV7-3, TRBJ1-1)
CASSQDWGAEAFF

SEQ ID NO: 789463 - protein, 12 aa, Homo sapiens
  CDR3 for alpha chain variable domain of TCR clone 394732 (TRAV21, TRAJ58)
CAAETSGSMLTF

SEQ ID NO: 789464 - protein, 15 aa, Homo sapiens
  CDR3 for beta chain variable domain of TCR clone 394732 (TRBV20-1, TRBJ2-7)
CSARDPVKGEGEQYF

SEQ ID NO: 789465 - protein, 16 aa, Homo sapiens
  CDR3 for alpha chain variable domain of TCR clone 394733 (TRAV30, TRAJ24)
CGTEIVDADSWGKFQV

SEQ ID NO: 789466 - protein, 11 aa, Homo sapiens
  CDR3 for beta chain variable domain of TCR clone 394733 (TRBV29-1, TRBJ2-5)
CSEDRTGTQYF

SEQ ID NO: 789467 - protein, 12 aa, Homo sapiens
  CDR3 for alpha chain variable domain of TCR clone 394734 (TRAV8-3, TRAJ20)
CAVGANDYKLSF

SEQ ID NO: 789468 - protein, 14 aa, Homo sapiens
  CDR3 for beta chain variable domain of TCR clone 394734 (TRBV6-1, TRBJ1-3)
CASVQGGGGDTIYF

SEQ ID NO: 789469 - protein, 14 aa, Homo sapiens
  CDR3 for alpha chain variable domain of TCR clone 394735 (TRAV8-3, TRAJ4)
CAVGAAGGYNKLIF

SEQ ID NO: 789470 - protein, 16 aa, Homo sapiens
  CDR3 for beta chain variable domain of TCR clone 394735 (TRBV7-9, TRBJ2-2)
CASSAPGLGGTGELFF

SEQ ID NO: 789471 - protein, 15 aa, Homo sapiens
  CDR3 for alpha chain variable domain of TCR clone 394736 (TRAV30, TRAJ32)
CGTEILGGATKKPIF

SEQ ID NO: 789472 - protein, 13 aa, Homo sapiens
  CDR3 for beta chain variable domain of TCR clone 394736 (TRBV6-3, TRBJ2-7)
CASSFSGGYEQYF

SEQ ID NO: 789473 - protein, 17 aa, Homo sapiens
  CDR3 for alpha chain variable domain of TCR clone 394737 (TRAV3, TRAJ6)
CAVRDGPRAGGRYIPTF

SEQ ID NO: 789474 - protein, 16 aa, Homo sapiens
  CDR3 for beta chain variable domain of TCR clone 394737 (TRBV4-1, TRBJ2-7)
CASSLTAGQATYEQYF

SEQ ID NO: 789475 - protein, 17 aa, Homo sapiens
  CDR3 for alpha chain variable domain of TCR clone 394738 (TRAV3, TRAJ42)
CAGRDRDYGGSQGNLIF

SEQ ID NO: 789476 - protein, 14 aa, Homo sapiens
  CDR3 for beta chain variable domain of TCR clone 394738 (TRBV19, TRBJ2-1)
CASPTFVLSGEQFF

SEQ ID NO: 789477 - protein, 16 aa, Homo sapiens
  CDR3 for alpha chain variable domain of TCR clone 394739 (TRAV12-2, TRAJ45)
CAVTRNPGGGADGLTF

SEQ ID NO: 789478 - protein, 12 aa, Homo sapiens
  CDR3 for beta chain variable domain of TCR clone 394739 (TRBV6-1, TRBJ2-5)
CASSGGRETQYF

SEQ ID NO: 789479 - protein, 15 aa, Homo sapiens
  CDR3 for alpha chain variable domain of TCR clone 394740 (TRAV2, TRAJ24)
CAVVRLKNSGGKLQF

SEQ ID NO: 789480 - protein, 17 aa, Homo sapiens
  CDR3 for beta chain variable domain of TCR clone 394740 (TRBV13, TRBJ2-3)
CASSLSRVAGGRNTQYF

SEQ ID NO: 789481 - protein, 13 aa, Homo sapiens
  CDR3 for alpha chain variable domain of TCR clone 394741 (TRAV12-3, TRAJ7)
CAMTPYGNNRLAF

SEQ ID NO: 789482 - protein, 15 aa, Homo sapiens
  CDR3 for beta chain variable domain of TCR clone 394741 (TRBV28, TRBJ2-7)
CASSLEAYPIYEQYF

SEQ ID NO: 789483 - protein, 11 aa, Homo sapiens
  CDR3 for alpha chain variable domain of TCR clone 394742 (TRAV1-2, TRAJ11)
CAVRGYSTLPF

SEQ ID NO: 789484 - protein, 13 aa, Homo sapiens
  CDR3 for beta chain variable domain of TCR clone 394742 (TRBV10-3, TRBJ2-7)
CASKLAVNYEQYF

SEQ ID NO: 789485 - protein, 10 aa, Homo sapiens
  CDR3 for alpha chain variable domain of TCR clone 394743 (TRAV1-2, TRAJ20)
CALNHYKLSF

SEQ ID NO: 789486 - protein, 16 aa, Homo sapiens
  CDR3 for beta chain variable domain of TCR clone 394743 (TRBV20-1, TRBJ1-1)
CSARALTQGMNTEAFF

SEQ ID NO: 789487 - protein, 14 aa, Homo sapiens
  CDR3 for alpha chain variable domain of TCR clone 394744 (TRAV1-2, TRAJ8)
CAVREDTGFQKLVL

SEQ ID NO: 789488 - protein, 15 aa, Homo sapiens
  CDR3 for beta chain variable domain of TCR clone 394744 (TRBV29-1, TRBJ2-1)
CSVPTGLALYNEQFF

SEQ ID NO: 789489 - protein, 13 aa, Homo sapiens
  CDR3 for alpha chain variable domain of TCR clone 394745 (TRAV12-2, TRAJ42)
CAVKRGSQGNLIF

SEQ ID NO: 789490 - protein, 16 aa, Homo sapiens
  CDR3 for beta chain variable domain of TCR clone 394745 (TRBV9, TRBJ2-2)
CASSAMGEGNTGELFF

SEQ ID NO: 789491 - protein, 15 aa, Homo sapiens
  CDR3 for alpha chain variable domain of TCR clone 394746 (TRAV26-1, TRAJ29)
CIVRVEGSGNTPLVF

SEQ ID NO: 789492 - protein, 12 aa, Homo sapiens
  CDR3 for beta chain variable domain of TCR clone 394746 (TRBV11-2, TRBJ2-1)
CASSPRNNEQFF

SEQ ID NO: 789493 - protein, 14 aa, Homo sapiens
  CDR3 for alpha chain variable domain of TCR clone 394747 (TRAV12-2, TRAJ13)
CAVEKTGGYQKVTF

SEQ ID NO: 789494 - protein, 15 aa, Homo sapiens
  CDR3 for beta chain variable domain of TCR clone 394747 (TRBV20-1, TRBJ2-7)
CSARDRVSGMDEQYF

SEQ ID NO: 789495 - protein, 13 aa, Homo sapiens
  CDR3 for alpha chain variable domain of TCR clone 394748 (TRAV27, TRAJ41)
CAGEGNSGYALNF

SEQ ID NO: 789496 - protein, 13 aa, Homo sapiens
  CDR3 for beta chain variable domain of TCR clone 394748 (TRBV7-3, TRBJ2-1)
CASSLDSYNEQFF

SEQ ID NO: 789497 - protein, 15 aa, Homo sapiens
  CDR3 for alpha chain variable domain of TCR clone 394749 (TRAV12-3, TRAJ22)
CAMRTISGSARQLPF

SEQ ID NO: 789498 - protein, 16 aa, Homo sapiens
  CDR3 for beta chain variable domain of TCR clone 394749 (TRBV20-1, TRBJ2-2)
CSARRPGTGNTGELFF

SEQ ID NO: 789499 - protein, 16 aa, Homo sapiens
  CDR3 for alpha chain variable domain of TCR clone 394750 (TRAV12-3, TRAJ53)
CAMSPGSGGSNYKLTF

SEQ ID NO: 789500 - protein, 16 aa, Homo sapiens
  CDR3 for beta chain variable domain of TCR clone 394750 (TRBV19, TRBJ2-1)
CASSKAGPSSYNEQLF

SEQ ID NO: 789501 - protein, 16 aa, Homo sapiens
  CDR3 for alpha chain variable domain of TCR clone 394751 (TRAV3, TRAJ10)
CAVRDMWAGGGNKLTF

SEQ ID NO: 789502 - protein, 14 aa, Homo sapiens
  CDR3 for beta chain variable domain of TCR clone 394751 (TRBV7-8, TRBJ2-3)
CASSLEAGTDTQYF

SEQ ID NO: 789503 - protein, 18 aa, Homo sapiens
  CDR3 for alpha chain variable domain of TCR clone 394752 (TRAV21, TRAJ52)
CAVRSSRAGGTSYGKLTF

SEQ ID NO: 789504 - protein, 17 aa, Homo sapiens
  CDR3 for beta chain variable domain of TCR clone 394752 (TRBV13, TRBJ2-3)
CASSLPRVAGGRNTQYF

SEQ ID NO: 789505 - protein, 22 aa, Homo sapiens
  CDR3 for alpha chain variable domain of TCR clone 394753 (TRAV30, TRAJ24)
CGTEIVDADSWGNSSLEQVPRL

SEQ ID NO: 789506 - protein, 14 aa, Homo sapiens
  CDR3 for beta chain variable domain of TCR clone 394753 (TRBV12-5, TRBJ2-5)
CASGSRTHQETQYF

SEQ ID NO: 789507 - protein, 16 aa, Homo sapiens
  CDR3 for alpha chain variable domain of TCR clone 394754 (TRAV3, TRAJ5)
CAARNLVDTGRRALTF

SEQ ID NO: 789508 - protein, 16 aa, Homo sapiens
  CDR3 for beta chain variable domain of TCR clone 394754 (TRBV12-5, TRBJ2-5)
CASGPRTSGNQETKYF

SEQ ID NO: 789509 - protein, 13 aa, Homo sapiens
  CDR3 for alpha chain variable domain of TCR clone 394755 (TRAV26-1, TRAJ12)
CIVRPDSSYKLIF

SEQ ID NO: 789510 - protein, 16 aa, Homo sapiens
  CDR3 for beta chain variable domain of TCR clone 394755 (TRBV12-5, TRBJ2-5)
CASGPRTSGNQETQYF

SEQ ID NO: 789511 - protein, 15 aa, Homo sapiens
  CDR3 for alpha chain variable domain of TCR clone 394756 (TRAV3, TRAJ5)
CAVRDLDTGRRALTF

SEQ ID NO: 789512 - protein, 16 aa, Homo sapiens
  CDR3 for beta chain variable domain of TCR clone 394756 (TRBV2, TRBJ2-1)
CASRSPAGGKYNEQFF

SEQ ID NO: 789513 - protein, 12 aa, Homo sapiens
  CDR3 for alpha chain variable domain of TCR clone 394757 (TRAV21, TRAJ15)
CAVNRAGTPLIF

SEQ ID NO: 789514 - protein, 13 aa, Homo sapiens
  CDR3 for beta chain variable domain of TCR clone 394757 (TRBV11-2, TRBJ2-5)
CASSSTGEETQYF

SEQ ID NO: 789515 - protein, 13 aa, Homo sapiens
  CDR3 for alpha chain variable domain of TCR clone 394758 (TRAV29/DV5, TRAJ44)
CAASTGTASKLTF

SEQ ID NO: 789516 - protein, 20 aa, Homo sapiens
  CDR3 for beta chain variable domain of TCR clone 394758 (TRBV11-2, TRBJ1-6)
CASSLVFATGGSVHPSTLGT

SEQ ID NO: 789517 - protein, 14 aa, Homo sapiens
  CDR3 for alpha chain variable domain of TCR clone 394759 (TRAV29/DV5, TRAJ49)
CAASLSNTGNQFYF

SEQ ID NO: 789518 - protein, 21 aa, Homo sapiens
  CDR3 for beta chain variable domain of TCR clone 394759 (TRBV9, TRBJ2-5)
CASRGRLAGGPEDTVLRARHA

SEQ ID NO: 789519 - protein, 14 aa, Homo sapiens
  CDR3 for alpha chain variable domain of TCR clone 394760 (TRAV12-3, TRAJ42)
CAMNYGGSQGSLIF

SEQ ID NO: 789520 - protein, 15 aa, Homo sapiens
  CDR3 for beta chain variable domain of TCR clone 394760 (TRBV11-2, TRBJ1-3)
CASSLDGTVGNTIYF

SEQ ID NO: 789521 - protein, 11 aa, Homo sapiens
  CDR3 for alpha chain variable domain of TCR clone 394761 (TRAV26-1, TRAJ27)
CIDPNAGKSTF

SEQ ID NO: 789522 - protein, 15 aa, Homo sapiens
  CDR3 for beta chain variable domain of TCR clone 394761 (TRBV7-9, TRBJ1-4)
CASSSGTPTNEKLFF

SEQ ID NO: 789523 - protein, 18 aa, Homo sapiens
  CDR3 for alpha chain variable domain of TCR clone 394762 (TRAV21, TRAJ52)
CAVRPSPAGGTSYGKPTF

SEQ ID NO: 789524 - protein, 12 aa, Homo sapiens
  CDR3 for beta chain variable domain of TCR clone 394762 (TRBV2, TRBJ2-1)
CAYGPPGNEQFF

SEQ ID NO: 789525 - protein, 12 aa, Homo sapiens
  CDR3 for alpha chain variable domain of TCR clone 394763 (TRAV12-3, TRAJ17)
CAMTLTGNKLTF

SEQ ID NO: 789526 - protein, 17 aa, Homo sapiens
  CDR3 for beta chain variable domain of TCR clone 394763 (TRBV7-3, TRBJ2-3)
CASSLMKRMRGADTQYF

SEQ ID NO: 789527 - protein, 15 aa, Homo sapiens
  CDR3 for alpha chain variable domain of TCR clone 394764 (TRAV26-1, TRAJ44)
CIVRIGTGTASKLTF

SEQ ID NO: 789528 - protein, 15 aa, Homo sapiens
  CDR3 for beta chain variable domain of TCR clone 394764 (TRBV2, TRBJ2-1)
CASSELAGSYNEQFF

SEQ ID NO: 789529 - protein, 14 aa, Homo sapiens
  CDR3 for alpha chain variable domain of TCR clone 394765 (TRAV12-1, TRAJ4)
CGEQRSGGYNKLIF

SEQ ID NO: 789530 - protein, 16 aa, Homo sapiens
  CDR3 for beta chain variable domain of TCR clone 394765 (TRBV11-2, TRBJ2-2)
CASSTHRGSDTGELFF

SEQ ID NO: 789531 - protein, 14 aa, Homo sapiens
  CDR3 for alpha chain variable domain of TCR clone 394766 (TRAV26-1, TRAJ21)
CIVRPPYNFNKFYY

SEQ ID NO: 789532 - protein, 14 aa, Homo sapiens
  CDR3 for beta chain variable domain of TCR clone 394766 (TRBV19, TRBJ2-1)
CASPTFVLSGEQFF

SEQ ID NO: 789533 - protein, 16 aa, Homo sapiens
  CDR3 for alpha chain variable domain of TCR clone 394767 (TRAV20, TRAJ52)
CAVLPDGGTSDGKLTF

SEQ ID NO: 789534 - protein, 12 aa, Homo sapiens
  CDR3 for beta chain variable domain of TCR clone 394767 (TRBV19, TRBJ2-1)
CASSQISNEQFF

SEQ ID NO: 789535 - protein, 12 aa, Homo sapiens
  CDR3 for alpha chain variable domain of TCR clone 394768 (TRAV12-3, TRAJ17)
CAMTLTGNKLTF

SEQ ID NO: 789536 - protein, 18 aa, Homo sapiens
  CDR3 for beta chain variable domain of TCR clone 394768 (TRBV20-1, TRBJ2-6)
RSAETTPTHGSGANVLTF

SEQ ID NO: 789537 - protein, 14 aa, Homo sapiens
  CDR3 for alpha chain variable domain of TCR clone 394769 (TRAV8-4, TRAJ9)
CAVRRNTGGFNTIF

SEQ ID NO: 789538 - protein, 15 aa, Homo sapiens
  CDR3 for beta chain variable domain of TCR clone 394769 (TRBV10-2, TRBJ2-6)
CASSEQGTGANVLTF

SEQ ID NO: 789539 - protein, 15 aa, Homo sapiens
  CDR3 for alpha chain variable domain of TCR clone 394770 (TRAV3, TRAJ3)
CAVRDRRSSASKIIF

SEQ ID NO: 789540 - protein, 22 aa, Homo sapiens
  CDR3 for beta chain variable domain of TCR clone 394770 (TRBV5-7, TRBJ2-5)
CASSTPGLGSCTKRPSTSGQAR

SEQ ID NO: 789541 - protein, 16 aa, Homo sapiens
  CDR3 for alpha chain variable domain of TCR clone 394771 (TRAV1-2, TRAJ33)
CAVRDGGPRSNYQLIW

SEQ ID NO: 789542 - protein, 15 aa, Homo sapiens
  CDR3 for beta chain variable domain of TCR clone 394771 (TRBV11-2, TRBJ1-3)
CASSLDGTVGNTIYF

SEQ ID NO: 789543 - protein, 16 aa, Homo sapiens
  CDR3 for alpha chain variable domain of TCR clone 394772 (TRAV30, TRAJ24)
CGTEIVDADSWGKFQF

SEQ ID NO: 789544 - protein, 15 aa, Homo sapiens
  CDR3 for beta chain variable domain of TCR clone 394772 (TRBV28, TRBJ2-1)
CASSIIAGGRSEQVF

SEQ ID NO: 789545 - protein, 18 aa, Homo sapiens
  CDR3 for alpha chain variable domain of TCR clone 394773 (TRAV12-2, )
CAVVDIQNPDPAVYQLRD

SEQ ID NO: 789546 - protein, 16 aa, Homo sapiens
  CDR3 for beta chain variable domain of TCR clone 394773 (TRBV6-1, TRBJ1-2)
CVSSGAWQGRSHGDTF

SEQ ID NO: 789547 - protein, 14 aa, Homo sapiens
  CDR3 for alpha chain variable domain of TCR clone 394774 (TRAV27, TRAJ45)
CAGAQEEVLTDSPF

SEQ ID NO: 789548 - protein, 11 aa, Homo sapiens
  CDR3 for beta chain variable domain of TCR clone 394774 (TRBV19, TRBJ1-1)
CASSIGSEAFF

SEQ ID NO: 789549 - protein, 14 aa, Homo sapiens
  CDR3 for alpha chain variable domain of TCR clone 394775 (TRAV17, TRAJ37)
CATDGSSNTGKLIF

SEQ ID NO: 789550 - protein, 14 aa, Homo sapiens
  CDR3 for beta chain variable domain of TCR clone 394775 (TRBV25-1, TRBJ1-1)
WASTHLGGNTEAFF

SEQ ID NO: 789551 - protein, 13 aa, Homo sapiens
  CDR3 for alpha chain variable domain of TCR clone 394776 (TRAV23/DV6, TRAJ34)
CAAIENNTDTLIF

SEQ ID NO: 789552 - protein, 18 aa, Homo sapiens
  CDR3 for beta chain variable domain of TCR clone 394776 (TRBV20-1, TRBJ2-6)
CSAETTPTHGSGANVLTF

SEQ ID NO: 789553 - protein, 13 aa, Homo sapiens
  CDR3 for alpha chain variable domain of TCR clone 394777 (TRAV1-2, TRAJ31)
CAVRPNNNARLMF

SEQ ID NO: 789554 - protein, 16 aa, Homo sapiens
  CDR3 for beta chain variable domain of TCR clone 394777 (TRBV5-1, TRBJ2-3)
CASSLEGGSFTDTQYF

SEQ ID NO: 789555 - protein, 15 aa, Homo sapiens
  CDR3 for alpha chain variable domain of TCR clone 394778 (TRAV27, TRAJ38)
CAARRNAVNNRNLIW

SEQ ID NO: 789556 - protein, 13 aa, Homo sapiens
  CDR3 for beta chain variable domain of TCR clone 394778 (TRBV12-5, TRBJ2-3)
CASGDRQSDTQYF

SEQ ID NO: 789557 - protein, 18 aa, Homo sapiens
  CDR3 for alpha chain variable domain of TCR clone 394779 (TRAV29/DV5, TRAJ52)
CAAGFRGAGGTSYGKLTF

SEQ ID NO: 789558 - protein, 16 aa, Homo sapiens
  CDR3 for beta chain variable domain of TCR clone 394779 (TRBV7-3, TRBJ2-2)
CASSLKRRTLSGELFF

SEQ ID NO: 789559 - protein, 18 aa, Homo sapiens
  CDR3 for alpha chain variable domain of TCR clone 394780 (TRAV26-1, TRAJ52)
CIVRVEGAGGTSYGKLTF

SEQ ID NO: 789560 - protein, 12 aa, Homo sapiens
  CDR3 for beta chain variable domain of TCR clone 394780 (TRBV5-1, TRBJ2-5)
CASSLGLETQYF

SEQ ID NO: 789561 - protein, 13 aa, Homo sapiens
  CDR3 for alpha chain variable domain of TCR clone 394781 (TRAV38-1, TRAJ42)
CARCGGSQGNLIF

SEQ ID NO: 789562 - protein, 17 aa, Homo sapiens
  CDR3 for beta chain variable domain of TCR clone 394781 (TRBV20-1, TRBJ2-1)
CSARDPLAGAWDNEQFF

SEQ ID NO: 789563 - protein, 12 aa, Homo sapiens
  CDR3 for alpha chain variable domain of TCR clone 394782 (TRAV35, TRAJ28)
GVEGAGSYQLTF

SEQ ID NO: 789564 - protein, 13 aa, Homo sapiens
  CDR3 for beta chain variable domain of TCR clone 394782 (TRBV28, TRBJ2-7)
CASSLPSRYEQYF

SEQ ID NO: 789565 - protein, 12 aa, Homo sapiens
  CDR3 for alpha chain variable domain of TCR clone 394783 (TRAV13-1, TRAJ21)
CAAKEGFNKFYF

SEQ ID NO: 789566 - protein, 14 aa, Homo sapiens
  CDR3 for beta chain variable domain of TCR clone 394783 (TRBV20-1, TRBJ2-1)
CSASLLDGYNEQFF

SEQ ID NO: 789567 - protein, 16 aa, Homo sapiens
  CDR3 for alpha chain variable domain of TCR clone 394784 (TRAV12-3, TRAJ53)
CALSPGSGGSNYKLTF

SEQ ID NO: 789568 - protein, 15 aa, Homo sapiens
  CDR3 for beta chain variable domain of TCR clone 394784 (TRBV11-3, TRBJ2-3)
CASLKDGREGDTQYF

SEQ ID NO: 789569 - protein, 13 aa, Homo sapiens
  CDR3 for alpha chain variable domain of TCR clone 394785 (TRAV30, TRAJ20)
CGTEDRSDYKLSF

SEQ ID NO: 789570 - protein, 15 aa, Homo sapiens
  CDR3 for beta chain variable domain of TCR clone 394785 (TRBV2, TRBJ1-2)
CASTQVQDSNYGHTF

SEQ ID NO: 789571 - protein, 11 aa, Homo sapiens
  CDR3 for alpha chain variable domain of TCR clone 394786 (TRAV17, TRAJ43)
CATPRSNDMRF

SEQ ID NO: 789572 - protein, 12 aa, Homo sapiens
  CDR3 for beta chain variable domain of TCR clone 394786 (TRBV12-4, TRBJ2-7)
CASSLGGYEQYF

SEQ ID NO: 789573 - protein, 13 aa, Homo sapiens
  CDR3 for alpha chain variable domain of TCR clone 394787 (TRAV9-2, TRAJ53)
CALSGGSNYKLTF

SEQ ID NO: 789574 - protein, 19 aa, Homo sapiens
  CDR3 for beta chain variable domain of TCR clone 394787 (TRBV25-1, TRBJ2-2)
CAILVYRVDRGRKTGELFF

SEQ ID NO: 789575 - protein, 16 aa, Homo sapiens
  CDR3 for alpha chain variable domain of TCR clone 394788 (TRAV8-3, TRAJ13)
CAVGAYPYGGYQKGTF

SEQ ID NO: 789576 - protein, 15 aa, Homo sapiens
  CDR3 for beta chain variable domain of TCR clone 394788 (TRBV19, TRBJ1-5)
CASSIVWADNQPQHF

SEQ ID NO: 789577 - protein, 13 aa, Homo sapiens
  CDR3 for alpha chain variable domain of TCR clone 394789 (TRAV6, TRAJ33)
CALPVDSNYQLIW

SEQ ID NO: 789578 - protein, 15 aa, Homo sapiens
  CDR3 for beta chain variable domain of TCR clone 394789 (TRBV11-2, TRBJ2-2)
CASRGLAANTGELFF

SEQ ID NO: 789579 - protein, 14 aa, Homo sapiens
  CDR3 for alpha chain variable domain of TCR clone 394790 (TRAV16, TRAJ33)
CALSAMDSNYQLIR

SEQ ID NO: 789580 - protein, 16 aa, Homo sapiens
  CDR3 for beta chain variable domain of TCR clone 394790 (TRBV12-4, TRBJ2-3)
CASSFPSNTNTDTQCF

SEQ ID NO: 789581 - protein, 14 aa, Homo sapiens
  CDR3 for alpha chain variable domain of TCR clone 394791 (TRAV13-1, TRAJ3)
CAASKSSSASKIII

SEQ ID NO: 789582 - protein, 13 aa, Homo sapiens
  CDR3 for beta chain variable domain of TCR clone 394791 (TRBV25-1, TRBJ2-5)
CASSESGRETQYF

SEQ ID NO: 789583 - protein, 18 aa, Homo sapiens
  CDR3 for alpha chain variable domain of TCR clone 394792 (TRAV13-1, TRAJ52)
CAAKNPNAGGTSYGNLTF

SEQ ID NO: 789584 - protein, 14 aa, Homo sapiens
  CDR3 for beta chain variable domain of TCR clone 394792 (TRBV7-3, TRBJ2-1)
CASSLAGGTNEQFF

SEQ ID NO: 789585 - protein, 14 aa, Homo sapiens
  CDR3 for alpha chain variable domain of TCR clone 394793 (TRAV21, TRAJ54)
CAVRPLQGAQKLVF

SEQ ID NO: 789586 - protein, 15 aa, Homo sapiens
  CDR3 for beta chain variable domain of TCR clone 394793 (TRBV7-9, TRBJ1-6)
CASSSPGRGNSPLHF

SEQ ID NO: 789587 - protein, 12 aa, Homo sapiens
  CDR3 for alpha chain variable domain of TCR clone 394794 (TRAV1-1, TRAJ9)
CAVDTGGFKTIF

SEQ ID NO: 789588 - protein, 15 aa, Homo sapiens
  CDR3 for beta chain variable domain of TCR clone 394794 (TRBV7-8, TRBJ1-5)
CASSLEGSGNQPQHF

SEQ ID NO: 789589 - protein, 15 aa, Homo sapiens
  CDR3 for alpha chain variable domain of TCR clone 394795 (TRAV22, TRAJ28)
CAARRSGAGSDQLTF

SEQ ID NO: 789590 - protein, 15 aa, Homo sapiens
  CDR3 for beta chain variable domain of TCR clone 394795 (TRBV14, TRBJ1-1)
CASSQDGMGRREAFF

SEQ ID NO: 789591 - protein, 11 aa, Homo sapiens
  CDR3 for alpha chain variable domain of TCR clone 394796 (TRAV23/DV6, TRAJ20)
CAAKDDYKLSF

SEQ ID NO: 789592 - protein, 11 aa, Homo sapiens
  CDR3 for beta chain variable domain of TCR clone 394796 (TRBV12-4, TRBJ2-3)
CASTATDTQYF

SEQ ID NO: 789593 - protein, 15 aa, Homo sapiens
  CDR3 for alpha chain variable domain of TCR clone 394797 (TRAV8-3, TRAJ11)
CAVGLLNSGYSTLTF

SEQ ID NO: 789594 - protein, 15 aa, Homo sapiens
  CDR3 for beta chain variable domain of TCR clone 394797 (TRBV7-9, TRBJ1-2)
LLSDRFSSGEDGYTF

SEQ ID NO: 789595 - protein, 15 aa, Homo sapiens
  CDR3 for alpha chain variable domain of TCR clone 394798 (TRAV21, TRAJ53)
CATLNSGGSNYKLTS

SEQ ID NO: 789596 - protein, 15 aa, Homo sapiens
  CDR3 for beta chain variable domain of TCR clone 394798 (TRBV2, TRBJ1-1)
CASSERSGRNTEAFF

SEQ ID NO: 789597 - protein, 16 aa, Homo sapiens
  CDR3 for alpha chain variable domain of TCR clone 394799 (TRAV13-1, TRAJ37)
CAASSLGTSNTGKLIF

SEQ ID NO: 789598 - protein, 12 aa, Homo sapiens
  CDR3 for beta chain variable domain of TCR clone 394799 (TRBV6-1, TRBJ2-5)
CASSEGRETQYF

SEQ ID NO: 789599 - protein, 14 aa, Homo sapiens
  CDR3 for alpha chain variable domain of TCR clone 394800 (TRAV12-2, TRAJ40)
CAVKIPSGTYKYIV

SEQ ID NO: 789600 - protein, 20 aa, Homo sapiens
  CDR3 for beta chain variable domain of TCR clone 394800 (TRBV28, TRBJ2-1)
CASTPIGRSPGLAGGNEQFF

SEQ ID NO: 789601 - protein, 15 aa, Homo sapiens
  CDR3 for alpha chain variable domain of TCR clone 394801 (TRAV20, TRAJ53)
CAVQASGGSNYKLTF

SEQ ID NO: 789602 - protein, 17 aa, Homo sapiens
  CDR3 for beta chain variable domain of TCR clone 394801 (TRBV11-2, TRBJ2-1)
CASSLCPPGVEYNEQFF

SEQ ID NO: 789603 - protein, 12 aa, Homo sapiens
  CDR3 for alpha chain variable domain of TCR clone 394802 (TRAV13-1, TRAJ45)
CAATRGADGLTF

SEQ ID NO: 789604 - protein, 16 aa, Homo sapiens
  CDR3 for beta chain variable domain of TCR clone 394802 (TRBV12-5, TRBJ2-5)
CASGPRTSGNQETQYF

SEQ ID NO: 789605 - protein, 14 aa, Homo sapiens
  CDR3 for alpha chain variable domain of TCR clone 394803 (TRAV16, TRAJ48)
CALTPGFGNEKLTF

SEQ ID NO: 789606 - protein, 14 aa, Homo sapiens
  CDR3 for beta chain variable domain of TCR clone 394803 (TRBV11-2, TRBJ2-3)
CASSRLARTDTQYF

SEQ ID NO: 789607 - protein, 14 aa, Homo sapiens
  CDR3 for alpha chain variable domain of TCR clone 394804 (TRAV3, TRAJ34)
CAVRDINYTDKLIF

SEQ ID NO: 789608 - protein, 13 aa, Homo sapiens
  CDR3 for beta chain variable domain of TCR clone 394804 (TRBV20-1, TRBJ1-1)
CSARGGGNTEAFF

SEQ ID NO: 789609 - protein, 16 aa, Homo sapiens
  CDR3 for alpha chain variable domain of TCR clone 394805 (TRAV17, TRAJ53)
CATDALSGGSNDKLTF

SEQ ID NO: 789610 - protein, 12 aa, Homo sapiens
  CDR3 for beta chain variable domain of TCR clone 394805 (TRBV11-2, TRBJ2-1)
CASSPGNNEQFF

SEQ ID NO: 789611 - protein, 15 aa, Homo sapiens
  CDR3 for alpha chain variable domain of TCR clone 394806 (TRAV21, TRAJ53)
CAVRQSGGSNYKLTL

SEQ ID NO: 789612 - protein, 14 aa, Homo sapiens
  CDR3 for beta chain variable domain of TCR clone 394806 (TRBV18, TRBJ2-5)
CASSPGVSQETQYF

SEQ ID NO: 789613 - protein, 16 aa, Homo sapiens
  CDR3 for alpha chain variable domain of TCR clone 394807 (TRAV30, TRAJ24)
CGTEIVDAESWGKFQF

SEQ ID NO: 789614 - protein, 18 aa, Homo sapiens
  CDR3 for beta chain variable domain of TCR clone 394807 (TRBV11-2, TRBJ2-3)
CASSLGGASRGAPNTQYF

SEQ ID NO: 789615 - protein, 14 aa, Homo sapiens
  CDR3 for alpha chain variable domain of TCR clone 394808 (TRAV38-1, TRAJ40)
CALRPTSGTYKYIF

SEQ ID NO: 789616 - protein, 16 aa, Homo sapiens
  CDR3 for beta chain variable domain of TCR clone 394808 (TRBV4-1, TRBJ2-5)
CASSSGLAGVLGTQYF

SEQ ID NO: 789617 - protein, 12 aa, Homo sapiens
  CDR3 for alpha chain variable domain of TCR clone 394809 (TRAV8-3, TRAJ20)
CAVGANDYKLSF

SEQ ID NO: 789618 - protein, 15 aa, Homo sapiens
  CDR3 for beta chain variable domain of TCR clone 394809 (TRBV5-1, TRBJ2-7)
CASSLNGGPAREQYF

SEQ ID NO: 789619 - protein, 14 aa, Homo sapiens
  CDR3 for alpha chain variable domain of TCR clone 394810 (TRAV3, TRAJ21)
CAVESQANFNKFYF

SEQ ID NO: 789620 - protein, 18 aa, Homo sapiens
  CDR3 for beta chain variable domain of TCR clone 394810 (TRBV7-9, TRBJ2-1)
CASSLAVSGTSGRTEQFF

SEQ ID NO: 789621 - protein, 10 aa, Homo sapiens
  CDR3 for alpha chain variable domain of TCR clone 394811 (TRAV5, TRAJ34)
CAEDTDKLIF

SEQ ID NO: 789622 - protein, 16 aa, Homo sapiens
  CDR3 for beta chain variable domain of TCR clone 394811 (TRBV3-1, TRBJ2-5)
CASSPGQFNGFGTQYF

SEQ ID NO: 789623 - protein, 13 aa, Homo sapiens
  CDR3 for alpha chain variable domain of TCR clone 394812 (TRAV27, TRAJ41)
CAGEGNSGYALNF

SEQ ID NO: 789624 - protein, 14 aa, Homo sapiens
  CDR3 for beta chain variable domain of TCR clone 394812 (TRBV7-2, TRBJ1-1)
CASSFLTGTTEAFC

SEQ ID NO: 789625 - protein, 14 aa, Homo sapiens
  CDR3 for alpha chain variable domain of TCR clone 394813 (TRAV20, TRAJ29)
CAVQESFRKHTSCL

SEQ ID NO: 789626 - protein, 16 aa, Homo sapiens
  CDR3 for beta chain variable domain of TCR clone 394813 (TRBV7-2, TRBJ2-7)
CASSLDLGGGAYEQYF

SEQ ID NO: 789627 - protein, 15 aa, Homo sapiens
  CDR3 for alpha chain variable domain of TCR clone 394814 (TRAV2, TRAJ15)
CAVEARGQAGTALIF

SEQ ID NO: 789628 - protein, 17 aa, Homo sapiens
  CDR3 for beta chain variable domain of TCR clone 394814 (TRBV20-1, TRBJ2-3)
CSARGTGGPTGTDTQYF

SEQ ID NO: 789629 - protein, 12 aa, Homo sapiens
  CDR3 for alpha chain variable domain of TCR clone 394815 (TRAV3, TRAJ7)
CAVLEENNRLAF

SEQ ID NO: 789630 - protein, 15 aa, Homo sapiens
  CDR3 for beta chain variable domain of TCR clone 394815 (TRBV10-2, TRBJ2-6)
CASSEQGTGANVLTF

SEQ ID NO: 789631 - protein, 17 aa, Homo sapiens
  CDR3 for alpha chain variable domain of TCR clone 394816 (TRAV12-2, TRAJ42)
CAVNILNYGGSQGNLIF

SEQ ID NO: 789632 - protein, 13 aa, Homo sapiens
  CDR3 for beta chain variable domain of TCR clone 394816 (TRBV24-1, TRBJ2-1)
CATSAGPYNEQFF

SEQ ID NO: 789633 - protein, 13 aa, Homo sapiens
  CDR3 for alpha chain variable domain of TCR clone 394817 (TRAV2, TRAJ40)
CAVVTSGTYKYIF

SEQ ID NO: 789634 - protein, 14 aa, Homo sapiens
  CDR3 for beta chain variable domain of TCR clone 394817 (TRBV11-3, TRBJ2-2)
CASSPRRDTGELFF

SEQ ID NO: 789635 - protein, 14 aa, Homo sapiens
  CDR3 for alpha chain variable domain of TCR clone 394818 (TRAV1-2, TRAJ16)
CAVNRFSDVQKLLF

SEQ ID NO: 789636 - protein, 14 aa, Homo sapiens
  CDR3 for beta chain variable domain of TCR clone 394818 (TRBV19, TRBJ1-5)
CASSQGYSNQPQHF

SEQ ID NO: 789637 - protein, 14 aa, Homo sapiens
  CDR3 for alpha chain variable domain of TCR clone 394819 (TRAV26-1, TRAJ44)
CIARTTGTASKLTF

SEQ ID NO: 789638 - protein, 17 aa, Homo sapiens
  CDR3 for beta chain variable domain of TCR clone 394819 (TRBV24-1, TRBJ2-1)
CATSDVSTSGTYNEQFF

SEQ ID NO: 789639 - protein, 13 aa, Homo sapiens
  CDR3 for alpha chain variable domain of TCR clone 394820 (TRAV13-1, TRAJ6)
CARGSGGSYIPTF

SEQ ID NO: 789640 - protein, 14 aa, Homo sapiens
  CDR3 for beta chain variable domain of TCR clone 394820 (TRBV4-1, TRBJ2-2)
CASSLTENTGELFF

SEQ ID NO: 789641 - protein, 14 aa, Homo sapiens
  CDR3 for alpha chain variable domain of TCR clone 394821 (TRAV16, TRAJ33)
CALSAMDSNYQLIC

SEQ ID NO: 789642 - protein, 17 aa, Homo sapiens
  CDR3 for beta chain variable domain of TCR clone 394821 (TRBV25-1, TRBJ2-7)
CASSDARVVFSSYEQYF

SEQ ID NO: 789643 - protein, 10 aa, Homo sapiens
  CDR3 for alpha chain variable domain of TCR clone 394822 (TRAV3, TRAJ29)
CAVRDSDSEF

SEQ ID NO: 789644 - protein, 15 aa, Homo sapiens
  CDR3 for beta chain variable domain of TCR clone 394822 (TRBV7-2, TRBJ2-5)
CASSGILAGAETQYF

SEQ ID NO: 789645 - protein, 11 aa, Homo sapiens
  CDR3 for alpha chain variable domain of TCR clone 394823 (TRAV3, TRAJ21)
CAVGNFNKFYF

SEQ ID NO: 789646 - protein, 14 aa, Homo sapiens
  CDR3 for beta chain variable domain of TCR clone 394823 (TRBV29-1, TRBJ2-2)
CSGRGSGNTGELFL

SEQ ID NO: 789647 - protein, 14 aa, Homo sapiens
  CDR3 for alpha chain variable domain of TCR clone 394824 (TRAV1-2, TRAJ16)
CAVNRFSDGQKLHF

SEQ ID NO: 789648 - protein, 10 aa, Homo sapiens
  CDR3 for beta chain variable domain of TCR clone 394824 (TRBV20-1, TRBJ1-4)
PQGANEKLFF

SEQ ID NO: 789649 - protein, 13 aa, Homo sapiens
  CDR3 for alpha chain variable domain of TCR clone 394825 (TRAV26-1, TRAJ33)
CIVRFEGNYQLIW

SEQ ID NO: 789650 - protein, 16 aa, Homo sapiens
  CDR3 for beta chain variable domain of TCR clone 394825 (TRBV15, TRBJ2-7)
CATSRDRGGRRGEQYF

SEQ ID NO: 789651 - protein, 15 aa, Homo sapiens
  CDR3 for alpha chain variable domain of TCR clone 394826 (TRAV26-1, TRAJ29)
CIVRVEGSGNTPLVF

SEQ ID NO: 789652 - protein, 15 aa, Homo sapiens
  CDR3 for beta chain variable domain of TCR clone 394826 (TRBV11-1, TRBJ2-7)
CASSLNYGASYEQYF

SEQ ID NO: 789653 - protein, 14 aa, Homo sapiens
  CDR3 for alpha chain variable domain of TCR clone 394827 (TRAV2, TRAJ9)
CAVEDRSGGFKTIF

SEQ ID NO: 789654 - protein, 14 aa, Homo sapiens
  CDR3 for beta chain variable domain of TCR clone 394827 (TRBV4-1, TRBJ2-7)
CASSPVAGGDEQYF

SEQ ID NO: 789655 - protein, 14 aa, Homo sapiens
  CDR3 for alpha chain variable domain of TCR clone 394828 (TRAV23/DV6, TRAJ58)
CAASKETSGSRLTF

SEQ ID NO: 789656 - protein, 17 aa, Homo sapiens
  CDR3 for beta chain variable domain of TCR clone 394828 (TRBV20-1, TRBJ2-1)
CSASSSGLAGSYNEQFF

SEQ ID NO: 789657 - protein, 15 aa, Homo sapiens
  CDR3 for alpha chain variable domain of TCR clone 394829 (TRAV26-1, TRAJ56)
CIVRVATGANSKLTF

SEQ ID NO: 789658 - protein, 16 aa, Homo sapiens
  CDR3 for beta chain variable domain of TCR clone 394829 (TRBV11-2, TRBJ1-2)
CASSLVTGGADYGYTF

SEQ ID NO: 789659 - protein, 14 aa, Homo sapiens
  CDR3 for alpha chain variable domain of TCR clone 394830 (TRAV12-3, TRAJ29)
CAMSPYSGNTPLVF

SEQ ID NO: 789660 - protein, 15 aa, Homo sapiens
  CDR3 for beta chain variable domain of TCR clone 394830 (TRBV27, TRBJ2-1)
CASSNGGGYANGQFF

SEQ ID NO: 789661 - protein, 14 aa, Homo sapiens
  CDR3 for alpha chain variable domain of TCR clone 394831 (TRAV8-3, TRAJ39)
CAVGANNAGNMLTF

SEQ ID NO: 789662 - protein, 12 aa, Homo sapiens
  CDR3 for beta chain variable domain of TCR clone 394831 (TRBV28, TRBJ1-3)
CASVSSGNTIDF

SEQ ID NO: 789663 - protein, 14 aa, Homo sapiens
  CDR3 for alpha chain variable domain of TCR clone 394832 (TRAV38-1, TRAJ39)
CAFAYNNAGNMLTF

SEQ ID NO: 789664 - protein, 16 aa, Homo sapiens
  CDR3 for beta chain variable domain of TCR clone 394832 (TRBV15, TRBJ2-7)
CATSRDRGRRRGEQYF

SEQ ID NO: 789665 - protein, 16 aa, Homo sapiens
  CDR3 for alpha chain variable domain of TCR clone 394833 (TRAV12-2, TRAJ10)
CAVNRVLTGVGNKLTF

SEQ ID NO: 789666 - protein, 12 aa, Homo sapiens
  CDR3 for beta chain variable domain of TCR clone 394833 (TRBV28, TRBJ2-7)
CASSFSSYEQYF

SEQ ID NO: 789667 - protein, 14 aa, Homo sapiens
  CDR3 for alpha chain variable domain of TCR clone 394834 (TRAV1-2, TRAJ16)
CAVNRFSDGQKLLF

SEQ ID NO: 789668 - protein, 13 aa, Homo sapiens
  CDR3 for beta chain variable domain of TCR clone 394834 (TRBV9, TRBJ2-7)
CASSLNSAYEQYF

SEQ ID NO: 789669 - protein, 16 aa, Homo sapiens
  CDR3 for alpha chain variable domain of TCR clone 394835 (TRAV3, TRAJ37)
CAVRPHGSGNTAKLIF

SEQ ID NO: 789670 - protein, 15 aa, Homo sapiens
  CDR3 for beta chain variable domain of TCR clone 394835 (TRBV10-3, TRBJ2-3)
CAISLTSGGTDTQYF

SEQ ID NO: 789671 - protein, 13 aa, Homo sapiens
  CDR3 for alpha chain variable domain of TCR clone 394836 (TRAV8-3, TRAJ44)
CAGVPGTASKLTF

SEQ ID NO: 789672 - protein, 14 aa, Homo sapiens
  CDR3 for beta chain variable domain of TCR clone 394836 (TRBV11-2, TRBJ2-3)
CASRRLARTDTQYF

SEQ ID NO: 789673 - protein, 16 aa, Homo sapiens
  CDR3 for alpha chain variable domain of TCR clone 394837 (TRAV21, TRAJ52)
CAVTNAGGTSYGKLTF

SEQ ID NO: 789674 - protein, 12 aa, Homo sapiens
  CDR3 for beta chain variable domain of TCR clone 394837 (TRBV2, TRBJ2-1)
CAYGPPGNEQFF

SEQ ID NO: 789675 - protein, 16 aa, Homo sapiens
  CDR3 for alpha chain variable domain of TCR clone 394838 (TRAV3, TRAJ15)
CAVRDRTNQAGTALIF

SEQ ID NO: 789676 - protein, 14 aa, Homo sapiens
  CDR3 for beta chain variable domain of TCR clone 394838 (TRBV2, TRBJ2-3)
CASTAQTSTDTQYF

SEQ ID NO: 789677 - protein, 13 aa, Homo sapiens
  CDR3 for alpha chain variable domain of TCR clone 394839 (TRAV2, TRAJ40)
CAVVASGTYKYIF

SEQ ID NO: 789678 - protein, 14 aa, Homo sapiens
  CDR3 for beta chain variable domain of TCR clone 394839 (TRBV19, TRBJ2-1)
CASATFVLSGEQFF

SEQ ID NO: 789679 - protein, 13 aa, Homo sapiens
  CDR3 for alpha chain variable domain of TCR clone 394840 (TRAV27, TRAJ6)
CAGGTRGSYIPTF

SEQ ID NO: 789680 - protein, 13 aa, Homo sapiens
  CDR3 for beta chain variable domain of TCR clone 394840 (TRBV4-2, TRBJ1-1)
CASSQAGNTEAVF

SEQ ID NO: 789681 - protein, 15 aa, Homo sapiens
  CDR3 for alpha chain variable domain of TCR clone 394841 (TRAV12-1, TRAJ45)
CVVLSGGGGADGLTF

SEQ ID NO: 789682 - protein, 15 aa, Homo sapiens
  CDR3 for beta chain variable domain of TCR clone 394841 (TRBV7-2, TRBJ2-1)
CASSLVGSSYNEQFF

SEQ ID NO: 789683 - protein, 14 aa, Homo sapiens
  CDR3 for alpha chain variable domain of TCR clone 394842 (TRAV17, TRAJ22)
CATSPSGSARQLTF

SEQ ID NO: 789684 - protein, 14 aa, Homo sapiens
  CDR3 for beta chain variable domain of TCR clone 394842 (TRBV20-1, TRBJ2-5)
CSALVPGYQETQYL

SEQ ID NO: 789685 - protein, 13 aa, Homo sapiens
  CDR3 for alpha chain variable domain of TCR clone 394843 (TRAV3, TRAJ21)
CAVREPAFNKFYF

SEQ ID NO: 789686 - protein, 15 aa, Homo sapiens
  CDR3 for beta chain variable domain of TCR clone 394843 (TRBV20-1, TRBJ1-1)
CSASRGVTGNTEAFF

SEQ ID NO: 789687 - protein, 12 aa, Homo sapiens
  CDR3 for alpha chain variable domain of TCR clone 394844 (TRAV13-2, TRAJ8)
CAPWLCFQKLVF

SEQ ID NO: 789688 - protein, 14 aa, Homo sapiens
  CDR3 for beta chain variable domain of TCR clone 394844 (TRBV18, TRBJ1-5)
CASSRQQRNQPQHF

SEQ ID NO: 789689 - protein, 13 aa, Homo sapiens
  CDR3 for alpha chain variable domain of TCR clone 394845 (TRAV3, TRAJ5)
CAVRDTGRRALTF

SEQ ID NO: 789690 - protein, 14 aa, Homo sapiens
  CDR3 for beta chain variable domain of TCR clone 394845 (TRBV12-5, TRBJ2-5)
CASGSRTHQETQYF

SEQ ID NO: 789691 - protein, 12 aa, Homo sapiens
  CDR3 for alpha chain variable domain of TCR clone 394846 (TRAV12-3, TRAJ17)
CAMKLTGNKLTF

SEQ ID NO: 789692 - protein, 17 aa, Homo sapiens
  CDR3 for beta chain variable domain of TCR clone 394846 (TRBV11-2, TRBJ2-1)
CASSLYPPGVEYNEQFF

SEQ ID NO: 789693 - protein, 13 aa, Homo sapiens
  CDR3 for alpha chain variable domain of TCR clone 394847 (TRAV26-2, TRAJ43)
CILRAVNNNDMSS

SEQ ID NO: 789694 - protein, 13 aa, Homo sapiens
  CDR3 for beta chain variable domain of TCR clone 394847 (TRBV2, TRBJ2-7)
CASSVGGSGEQYF

SEQ ID NO: 789695 - protein, 13 aa, Homo sapiens
  CDR3 for alpha chain variable domain of TCR clone 394848 (TRAV8-3, TRAJ36)
CAVGATGANNLFF

SEQ ID NO: 789696 - protein, 13 aa, Homo sapiens
  CDR3 for beta chain variable domain of TCR clone 394848 (TRBV7-9, TRBJ2-2)
CASSLDPTGELFF

SEQ ID NO: 789697 - protein, 15 aa, Homo sapiens
  CDR3 for alpha chain variable domain of TCR clone 394849 (TRAV20, TRAJ43)
CAVQAGKSSNNDMRF

SEQ ID NO: 789698 - protein, 18 aa, Homo sapiens
  CDR3 for beta chain variable domain of TCR clone 394849 (TRBV12-4, TRBJ2-4)
CASSRTGAVDVAKNIQYF

SEQ ID NO: 789699 - protein, 13 aa, Homo sapiens
  CDR3 for alpha chain variable domain of TCR clone 394850 (TRAV26-1, TRAJ34)
CIVRPWITDNPIF

SEQ ID NO: 789700 - protein, 14 aa, Homo sapiens
  CDR3 for beta chain variable domain of TCR clone 394850 (TRBV12-4, TRBJ1-4)
CASSRQGANEKLFF

SEQ ID NO: 789701 - protein, 11 aa, Homo sapiens
  CDR3 for alpha chain variable domain of TCR clone 394851 (TRAV2, TRAJ13)
CASGGYQKVTF

SEQ ID NO: 789702 - protein, 12 aa, Homo sapiens
  CDR3 for beta chain variable domain of TCR clone 394851 (TRBV7-8, TRBJ2-7)
CASSLGDMEQYF

SEQ ID NO: 789703 - protein, 15 aa, Homo sapiens
  CDR3 for alpha chain variable domain of TCR clone 394852 (TRAV8-3, TRAJ45)
CASSYSGGGADGLTF

SEQ ID NO: 789704 - protein, 12 aa, Homo sapiens
  CDR3 for beta chain variable domain of TCR clone 394852 (TRBV2, TRBJ2-1)
CAYGPPGNEQFF

SEQ ID NO: 789705 - protein, 14 aa, Homo sapiens
  CDR3 for alpha chain variable domain of TCR clone 394853 (TRAV3, TRAJ7)
CAVREEEREQQTRF

SEQ ID NO: 789706 - protein, 15 aa, Homo sapiens
  CDR3 for beta chain variable domain of TCR clone 394853 (TRBV20-1, TRBJ2-7)
CSARVPAAYFYEQYF

SEQ ID NO: 789707 - protein, 11 aa, Homo sapiens
  CDR3 for alpha chain variable domain of TCR clone 394854 (TRAV17, TRAJ9)
CATTGGFKTIF

SEQ ID NO: 789708 - protein, 11 aa, Homo sapiens
  CDR3 for beta chain variable domain of TCR clone 394854 (TRBV7-9, TRBJ2-7)
RASSLSLEQYF

SEQ ID NO: 789709 - protein, 14 aa, Homo sapiens
  CDR3 for alpha chain variable domain of TCR clone 394855 (TRAV12-2, TRAJ17)
CAVNITAAGNKLTF

SEQ ID NO: 789710 - protein, 16 aa, Homo sapiens
  CDR3 for beta chain variable domain of TCR clone 394855 (TRBV20-1, TRBJ2-6)
CSASSQGYDGANVLTF

SEQ ID NO: 789711 - protein, 15 aa, Homo sapiens
  CDR3 for alpha chain variable domain of TCR clone 394856 (TRAV26-1, TRAJ29)
CIVRVEGSGNTHLVF

SEQ ID NO: 789712 - protein, 14 aa, Homo sapiens
  CDR3 for beta chain variable domain of TCR clone 394856 (TRBV18, TRBJ2-5)
CASSPGVAQETQYF

SEQ ID NO: 789713 - protein, 15 aa, Homo sapiens
  CDR3 for alpha chain variable domain of TCR clone 394857 (TRAV12-1, TRAJ6)
CVVNCPLRRKLHTYI

SEQ ID NO: 789714 - protein, 16 aa, Homo sapiens
  CDR3 for beta chain variable domain of TCR clone 394857 (TRBV7-3, TRBJ2-2)
CASSLKRGTLSGELFF

SEQ ID NO: 789715 - protein, 16 aa, Homo sapiens
  CDR3 for alpha chain variable domain of TCR clone 394858 (TRAV3, TRAJ28)
CAVLPRSGAGSFQLTF

SEQ ID NO: 789716 - protein, 18 aa, Homo sapiens
  CDR3 for beta chain variable domain of TCR clone 394858 (TRBV23-1, TRBJ2-7)
CASSQYRRTDSTSSTSGR

SEQ ID NO: 789717 - protein, 16 aa, Homo sapiens
  CDR3 for alpha chain variable domain of TCR clone 394859 (TRAV12-3, TRAJ53)
CSMSPGRGGSNYKLTF

SEQ ID NO: 789718 - protein, 11 aa, Homo sapiens
  CDR3 for beta chain variable domain of TCR clone 394859 (TRBV29-1, TRBJ2-5)
CSEDRTGTQYF

SEQ ID NO: 789719 - protein, 16 aa, Homo sapiens
  CDR3 for alpha chain variable domain of TCR clone 394860 (TRAV3, TRAJ10)
CAVRDMNAGGGNKLTF

SEQ ID NO: 789720 - protein, 13 aa, Homo sapiens
  CDR3 for beta chain variable domain of TCR clone 394860 (TRBV2, TRAJ18)
CASSERAGEKLFF

SEQ ID NO: 789721 - protein, 14 aa, Homo sapiens
  CDR3 for alpha chain variable domain of TCR clone 394861 (TRAV26-1, TRAJ39)
CIVRGPRAGNMLTF

SEQ ID NO: 789722 - protein, 14 aa, Homo sapiens
  CDR3 for beta chain variable domain of TCR clone 394861 (TRBV25-1, TRBJ1-1)
CASTHLGGNTEAFF

SEQ ID NO: 789723 - protein, 14 aa, Homo sapiens
  CDR3 for alpha chain variable domain of TCR clone 394862 (TRAV12-1, TRAJ6)
CVVPTSGGSYIPTF

SEQ ID NO: 789724 - protein, 16 aa, Homo sapiens
  CDR3 for beta chain variable domain of TCR clone 394862 (TRBV2, TRBJ2-7)
CASSEAWTGPSYEQYF

SEQ ID NO: 789725 - protein, 16 aa, Homo sapiens
  CDR3 for alpha chain variable domain of TCR clone 394863 (TRAV4, TRAJ8)
CLVGDSGNTGFQKLVF

SEQ ID NO: 789726 - protein, 15 aa, Homo sapiens
  CDR3 for beta chain variable domain of TCR clone 394863 (TRBV15, TRBJ1-2)
CATSRVRASGSDYTF

SEQ ID NO: 789727 - protein, 15 aa, Homo sapiens
  CDR3 for alpha chain variable domain of TCR clone 394864 (TRAV12-3, TRAJ6)
CAISATTGGSYIPTF

SEQ ID NO: 789728 - protein, 12 aa, Homo sapiens
  CDR3 for beta chain variable domain of TCR clone 394864 (TRBV11-2, TRBJ2-1)
CASSPGNNEQFF

SEQ ID NO: 789729 - protein, 13 aa, Homo sapiens
  CDR3 for alpha chain variable domain of TCR clone 394865 (TRAV35, TRAJ32)
CAGVGGATNKLIF

SEQ ID NO: 789730 - protein, 13 aa, Homo sapiens
  CDR3 for beta chain variable domain of TCR clone 394865 (TRBV19, TRBJ2-3)
CATWDKITDTQYF

SEQ ID NO: 789731 - protein, 13 aa, Homo sapiens
  CDR3 for alpha chain variable domain of TCR clone 394866 (TRAV27, TRAJ45)
CRSSGGGADGLTF

SEQ ID NO: 789732 - protein, 14 aa, Homo sapiens
  CDR3 for beta chain variable domain of TCR clone 394866 (TRBV27, TRBJ2-1)
CASSATGGYNEQFF

SEQ ID NO: 789733 - protein, 11 aa, Homo sapiens
  CDR3 for alpha chain variable domain of TCR clone 394867 (TRAV13-1, TRAJ15)
CAATPGTALIF

SEQ ID NO: 789734 - protein, 13 aa, Homo sapiens
  CDR3 for beta chain variable domain of TCR clone 394867 (TRBV7-2, TRBJ2-1)
CASSLWVYNEQFF

SEQ ID NO: 789735 - protein, 11 aa, Homo sapiens
  CDR3 for alpha chain variable domain of TCR clone 394868 (TRAV29/DV5, TRAJ47)
CAAQRGNKLVF

SEQ ID NO: 789736 - protein, 13 aa, Homo sapiens
  CDR3 for beta chain variable domain of TCR clone 394868 (TRBV6-4, TRBJ1-5)
CASSADLNQPQHF

SEQ ID NO: 789737 - protein, 12 aa, Homo sapiens
  CDR3 for alpha chain variable domain of TCR clone 394869 (TRAV12-2, TRAJ11)
CAANSGYSTLTS

SEQ ID NO: 789738 - protein, 16 aa, Homo sapiens
  CDR3 for beta chain variable domain of TCR clone 394869 (TRBV28, TRBJ2-1)
CASSRTSGDTYNEQFF

SEQ ID NO: 789739 - protein, 13 aa, Homo sapiens
  CDR3 for alpha chain variable domain of TCR clone 394870 (TRAV27, TRAJ45)
CRSSGGGADGLTF

SEQ ID NO: 789740 - protein, 15 aa, Homo sapiens
  CDR3 for beta chain variable domain of TCR clone 394870 (TRBV4-1, TRBJ2-7)
CASSQNTGRLYEQYF

SEQ ID NO: 789741 - protein, 15 aa, Homo sapiens
  CDR3 for alpha chain variable domain of TCR clone 394871 (TRAV27, TRAJ38)
CAALRNAGNNRKMIW

SEQ ID NO: 789742 - protein, 11 aa, Homo sapiens
  CDR3 for beta chain variable domain of TCR clone 394871 (TRBV12-4, TRBJ2-2)
CASSSAGELFF

SEQ ID NO: 789743 - protein, 11 aa, Homo sapiens
  CDR3 for alpha chain variable domain of TCR clone 394872 (TRAV1-1, TRAJ23)
CAVRQGGKLIF

SEQ ID NO: 789744 - protein, 14 aa, Homo sapiens
  CDR3 for beta chain variable domain of TCR clone 394872 (TRBV19, TRBJ2-1)
CTSPTFVLSGEQFF

SEQ ID NO: 789745 - protein, 14 aa, Homo sapiens
  CDR3 for alpha chain variable domain of TCR clone 394873 (TRAV4, TRAJ9)
CLVCSGNGGFKTIF

SEQ ID NO: 789746 - protein, 15 aa, Homo sapiens
  CDR3 for beta chain variable domain of TCR clone 394873 (TRBV7-2, TRBJ2-1)
CASSLASGRVNEQFF

SEQ ID NO: 789747 - protein, 13 aa, Homo sapiens
  CDR3 for alpha chain variable domain of TCR clone 394874 (TRAV21, TRAJ3)
CCEPYSSASKIIF

SEQ ID NO: 789748 - protein, 11 aa, Homo sapiens
  CDR3 for beta chain variable domain of TCR clone 394874 (TRBV29-1, TRBJ2-5)
CSEDRTGTQYF

SEQ ID NO: 789749 - protein, 16 aa, Homo sapiens
  CDR3 for alpha chain variable domain of TCR clone 394875 (TRAV35, TRAJ52)
CAGQGSGGTSYGKPTF

SEQ ID NO: 789750 - protein, 17 aa, Homo sapiens
  CDR3 for beta chain variable domain of TCR clone 394875 (TRBV13, TRBJ2-3)
CASSLSRVAGGRNTQYF

SEQ ID NO: 789751 - protein, 15 aa, Homo sapiens
  CDR3 for alpha chain variable domain of TCR clone 394876 (TRAV21, TRAJ38)
CAVRQDAVNNRKLIW

SEQ ID NO: 789752 - protein, 16 aa, Homo sapiens
  CDR3 for beta chain variable domain of TCR clone 394876 (TRBV4-2, TRBJ1-1)
CASRSLDGGGDTEAFF

SEQ ID NO: 789753 - protein, 13 aa, Homo sapiens
  CDR3 for alpha chain variable domain of TCR clone 394877 (TRAV23/DV6, TRAJ15)
CAALPAGRNCSDL

SEQ ID NO: 789754 - protein, 14 aa, Homo sapiens
  CDR3 for beta chain variable domain of TCR clone 394877 (TRBV7-9, TRBJ1-2)
CTSSRQGANYGYTF

SEQ ID NO: 789755 - protein, 18 aa, Homo sapiens
  CDR3 for alpha chain variable domain of TCR clone 394878 (TRAV21, TRAJ52)
CAVRPSPAGGTSYGKLAF

SEQ ID NO: 789756 - protein, 17 aa, Homo sapiens
  CDR3 for beta chain variable domain of TCR clone 394878 (TRBV25-1, TRBJ2-1)
CASSAYGQGRGVYEQFF

SEQ ID NO: 789757 - protein, 11 aa, Homo sapiens
  CDR3 for alpha chain variable domain of TCR clone 394879 (TRAV35, TRAJ34)
SWARNTDKLIF

SEQ ID NO: 789758 - protein, 14 aa, Homo sapiens
  CDR3 for beta chain variable domain of TCR clone 394879 (TRBV5-1, TRBJ2-7)
CASSRGESLYEQYF

SEQ ID NO: 789759 - protein, 14 aa, Homo sapiens
  CDR3 for alpha chain variable domain of TCR clone 394880 (TRAV1-2, TRAJ16)
CAVNRFSDGQKLLF

SEQ ID NO: 789760 - protein, 13 aa, Homo sapiens
  CDR3 for beta chain variable domain of TCR clone 394880 (TRBV7-6, TRBJ2-3)
CASSLRSDNTQYF

SEQ ID NO: 789761 - protein, 11 aa, Homo sapiens
  CDR3 for alpha chain variable domain of TCR clone 394881 (TRAV2, TRAJ33)
CAVDSNYQLIW

SEQ ID NO: 789762 - protein, 14 aa, Homo sapiens
  CDR3 for beta chain variable domain of TCR clone 394881 (TRBV19, TRBJ2-7)
CASSIFAGTYEQYF

SEQ ID NO: 789763 - protein, 13 aa, Homo sapiens
  CDR3 for alpha chain variable domain of TCR clone 394882 (TRAV12-2, TRAJ20)
CAVYPPNDYKLSF

SEQ ID NO: 789764 - protein, 15 aa, Homo sapiens
  CDR3 for beta chain variable domain of TCR clone 394882 (TRBV18, TRBJ1-2)
CASSPGNGLGYGYTF

SEQ ID NO: 789765 - protein, 15 aa, Homo sapiens
  CDR3 for alpha chain variable domain of TCR clone 394883 (TRAV8-3, TRAJ21)
CAVGALPPRGYKFYF

SEQ ID NO: 789766 - protein, 18 aa, Homo sapiens
  CDR3 for beta chain variable domain of TCR clone 394883 (TRBV25-1, TRBJ1-2)
CASSGPQNGQGLIFGYSF

SEQ ID NO: 789767 - protein, 17 aa, Homo sapiens
  CDR3 for alpha chain variable domain of TCR clone 394884 (TRAV38-2/DV8, TRAJ28)
CAYRLAYSGAGSYQLTF

SEQ ID NO: 789768 - protein, 17 aa, Homo sapiens
  CDR3 for beta chain variable domain of TCR clone 394884 (TRBV4-3, TRBJ2-2)
CASSQDTSARSPGELFF

SEQ ID NO: 789769 - protein, 15 aa, Homo sapiens
  CDR3 for alpha chain variable domain of TCR clone 394885 (TRAV3, TRAJ5)
CAVRDRKTGRKALTF

SEQ ID NO: 789770 - protein, 15 aa, Homo sapiens
  CDR3 for beta chain variable domain of TCR clone 394885 (TRBV7-8, TRBJ2-1)
CASSLADSLYNGQFF

SEQ ID NO: 789771 - protein, 16 aa, Homo sapiens
  CDR3 for alpha chain variable domain of TCR clone 394886 (TRAV30, TRAJ24)
CGTEIVDADSWGKFQF

SEQ ID NO: 789772 - protein, 17 aa, Homo sapiens
  CDR3 for beta chain variable domain of TCR clone 394886 (TRBV18, TRBJ2-1)
CASSPLAAGAGDNEQFF

SEQ ID NO: 789773 - protein, 16 aa, Homo sapiens
  CDR3 for alpha chain variable domain of TCR clone 394887 (TRAV1-2, TRAJ16)
CAVNRFSDGRSCSLQG

SEQ ID NO: 789774 - protein, 18 aa, Homo sapiens
  CDR3 for beta chain variable domain of TCR clone 394887 (TRBV20-1, TRBJ2-6)
CSAETTPTHGSGANVLTF

SEQ ID NO: 789775 - protein, 15 aa, Homo sapiens
  CDR3 for alpha chain variable domain of TCR clone 394888 (TRAV8-6, TRAJ11)
CAVNCMNSGYSTLTF

SEQ ID NO: 789776 - protein, 17 aa, Homo sapiens
  CDR3 for beta chain variable domain of TCR clone 394888 (TRBV3-1, TRBJ2-5)
CASSNWGGTSGQETQYF

SEQ ID NO: 789777 - protein, 16 aa, Homo sapiens
  CDR3 for alpha chain variable domain of TCR clone 394889 (TRAV13-1, TRAJ22)
CAANVGRSGSARQLTF

SEQ ID NO: 789778 - protein, 15 aa, Homo sapiens
  CDR3 for beta chain variable domain of TCR clone 394889 (TRBV9, TRBJ1-6)
CASSVAGTGDSPLHF

SEQ ID NO: 789779 - protein, 16 aa, Homo sapiens
  CDR3 for alpha chain variable domain of TCR clone 394890 (TRAV13-2, TRAJ53)
CAENTNSGGSNYKLTF

SEQ ID NO: 789780 - protein, 19 aa, Homo sapiens
  CDR3 for beta chain variable domain of TCR clone 394890 (TRBV28, TRBJ2-7)
CASSYSGTSRLGWVYEQYF

SEQ ID NO: 789781 - protein, 14 aa, Homo sapiens
  CDR3 for alpha chain variable domain of TCR clone 394891 (TRAV17, TRAJ12)
CAILPMDSSYKLIF

SEQ ID NO: 789782 - protein, 12 aa, Homo sapiens
  CDR3 for beta chain variable domain of TCR clone 394891 (TRBV2, TRBJ2-1)
CAYGPPGNEQFF

SEQ ID NO: 789783 - protein, 13 aa, Homo sapiens
  CDR3 for alpha chain variable domain of TCR clone 394892 (TRAV1-1, TRAJ9)
CAAKNIGGFKTIF

SEQ ID NO: 789784 - protein, 14 aa, Homo sapiens
  CDR3 for beta chain variable domain of TCR clone 394892 (TRBV12-5, TRBJ2-5)
CASGSRTHQETQYF

SEQ ID NO: 789785 - protein, 16 aa, Homo sapiens
  CDR3 for alpha chain variable domain of TCR clone 394893 (TRAV1-2, TRAJ10)
CAVRGGLTGGGNKLTF

SEQ ID NO: 789786 - protein, 12 aa, Homo sapiens
  CDR3 for beta chain variable domain of TCR clone 394893 (TRBV7-8, TRBJ2-7)
CASSLEDREQYF

SEQ ID NO: 789787 - protein, 14 aa, Homo sapiens
  CDR3 for alpha chain variable domain of TCR clone 394894 (TRAV12-1, TRAJ17)
CEVNYKAAGNKLTF

SEQ ID NO: 789788 - protein, 15 aa, Homo sapiens
  CDR3 for beta chain variable domain of TCR clone 394894 (TRBV20-1, TRBJ2-7)
CSARDRVSGMDEQYF

SEQ ID NO: 789789 - protein, 16 aa, Homo sapiens
  CDR3 for alpha chain variable domain of TCR clone 394895 (TRAV30, TRAJ24)
CGTEIVDADSWGKFQF

SEQ ID NO: 789790 - protein, 15 aa, Homo sapiens
  CDR3 for beta chain variable domain of TCR clone 394895 (TRBV20-1, TRBJ2-7)
CSARDRVSGMYEQYF

SEQ ID NO: 789791 - protein, 16 aa, Homo sapiens
  CDR3 for alpha chain variable domain of TCR clone 394896 (TRAV3, TRAJ3)
CAVRDRAKSSASKIIF

SEQ ID NO: 789792 - protein, 16 aa, Homo sapiens
  CDR3 for beta chain variable domain of TCR clone 394896 (TRBV20-1, TRBJ2-4)
CSATSLTELAKNIQYF

SEQ ID NO: 789793 - protein, 14 aa, Homo sapiens
  CDR3 for alpha chain variable domain of TCR clone 394897 (TRAV35, TRAJ53)
GRVNSGGSNYKLTF

SEQ ID NO: 789794 - protein, 13 aa, Homo sapiens
  CDR3 for beta chain variable domain of TCR clone 394897 (TRBV7-9, TRBJ1-2)
CASSPSNFWGYTF

SEQ ID NO: 789795 - protein, 14 aa, Homo sapiens
  CDR3 for alpha chain variable domain of TCR clone 394898 (TRAV12-3, TRAJ10)
SHLPLTGGGNKLTF

SEQ ID NO: 789796 - protein, 15 aa, Homo sapiens
  CDR3 for beta chain variable domain of TCR clone 394898 (TRBV11-2, TRBJ2-1)
CASSLGPDSYNEQFF

SEQ ID NO: 789797 - protein, 14 aa, Homo sapiens
  CDR3 for alpha chain variable domain of TCR clone 394899 (TRAV13-1, TRAJ35)
CAASKGGFGNGLHC

SEQ ID NO: 789798 - protein, 13 aa, Homo sapiens
  CDR3 for beta chain variable domain of TCR clone 394899 (TRBV12-4, TRBJ2-7)
CASSPTETYEQYF

SEQ ID NO: 789799 - protein, 15 aa, Homo sapiens
  CDR3 for alpha chain variable domain of TCR clone 394900 (TRAV17, TRAJ57)
CATGPSQGGSEKMVF

SEQ ID NO: 789800 - protein, 18 aa, Homo sapiens
  CDR3 for beta chain variable domain of TCR clone 394900 (TRBV7-9, TRBJ2-7)
CASSLTTSGSRTWYEQYF

SEQ ID NO: 789801 - protein, 18 aa, Homo sapiens
  CDR3 for alpha chain variable domain of TCR clone 394901 (TRAV21, TRAJ52)
CAVRPSPAGGTSYGKLTF

SEQ ID NO: 789802 - protein, 22 aa, Homo sapiens
  CDR3 for beta chain variable domain of TCR clone 394901 (TRBV11-2, TRBJ1-4)
CASSLDITRRGIPRKDNEKLFF

SEQ ID NO: 789803 - protein, 14 aa, Homo sapiens
  CDR3 for alpha chain variable domain of TCR clone 394902 (TRAV12-3, TRAJ10)
SHLPLTGGGNKLTF

SEQ ID NO: 789804 - protein, 15 aa, Homo sapiens
  CDR3 for beta chain variable domain of TCR clone 394902 (TRBV4-1, TRBJ1-4)
CASRDTGGTNEKLFF

SEQ ID NO: 789805 - protein, 13 aa, Homo sapiens
  CDR3 for alpha chain variable domain of TCR clone 394903 (TRAV12-2, TRAJ7)
CAGLIYGNNSLAF

SEQ ID NO: 789806 - protein, 14 aa, Homo sapiens
  CDR3 for beta chain variable domain of TCR clone 394903 (TRBV6-1, TRBJ2-1)
CATFTSGQNNEQFF

SEQ ID NO: 789807 - protein, 17 aa, Homo sapiens
  CDR3 for alpha chain variable domain of TCR clone 394904 (TRAV12-1, TRAJ13)
CVVNKRGEFWGLPESYL

SEQ ID NO: 789808 - protein, 15 aa, Homo sapiens
  CDR3 for beta chain variable domain of TCR clone 394904 (TRBV7-2, TRBJ1-2)
CASSLAPDRGLGYTF

SEQ ID NO: 789809 - protein, 13 aa, Homo sapiens
  CDR3 for alpha chain variable domain of TCR clone 394905 (TRAV29/DV5, TRAJ31)
CAASRNNNARLMF

SEQ ID NO: 789810 - protein, 14 aa, Homo sapiens
  CDR3 for beta chain variable domain of TCR clone 394905 (TRBV7-2, TRBJ2-7)
CASSLYPGRYEQYF

SEQ ID NO: 789811 - protein, 14 aa, Homo sapiens
  CDR3 for alpha chain variable domain of TCR clone 394906 (TRAV8-3, TRAJ4)
CAVGAAGCYHKLIF

SEQ ID NO: 789812 - protein, 15 aa, Homo sapiens
  CDR3 for beta chain variable domain of TCR clone 394906 (TRBV6-5, TRBJ2-1)
CASSYDAGAGNEQFF

SEQ ID NO: 789813 - protein, 15 aa, Homo sapiens
  CDR3 for alpha chain variable domain of TCR clone 394907 (TRAV3, TRAJ20)
CAVRDIKLSDSKLSF

SEQ ID NO: 789814 - protein, 15 aa, Homo sapiens
  CDR3 for beta chain variable domain of TCR clone 394907 (TRBV7-9, TRBJ1-6)
CASSAPGRGNSPLHF

SEQ ID NO: 789815 - protein, 18 aa, Homo sapiens
  CDR3 for alpha chain variable domain of TCR clone 394908 (TRAV12-3, TRAJ52)
CAMSVGGAGGTSYGKLTF

SEQ ID NO: 789816 - protein, 15 aa, Homo sapiens
  CDR3 for beta chain variable domain of TCR clone 394908 (TRBV27, TRBJ1-6)
CASNFDRGLGSHLHF

SEQ ID NO: 789817 - protein, 18 aa, Homo sapiens
  CDR3 for alpha chain variable domain of TCR clone 394909 (TRAV21, TRAJ52)
CAVRPSPAGGTSYGKLTF

SEQ ID NO: 789818 - protein, 16 aa, Homo sapiens
  CDR3 for beta chain variable domain of TCR clone 394909 (TRBV7-3, TRBJ2-1)
CASSLEGYRSYNEQFY

SEQ ID NO: 789819 - protein, 16 aa, Homo sapiens
  CDR3 for alpha chain variable domain of TCR clone 394910 (TRAV29/DV5, TRAJ28)
CEADAYYGAGRYQLTF

SEQ ID NO: 789820 - protein, 15 aa, Homo sapiens
  CDR3 for beta chain variable domain of TCR clone 394910 (TRBV24-1, TRBJ1-4)
CATSDPQGADEKLFF

SEQ ID NO: 789821 - protein, 11 aa, Homo sapiens
  CDR3 for alpha chain variable domain of TCR clone 394911 (TRAV2, TRAJ13)
CASGGYQKVTF

SEQ ID NO: 789822 - protein, 15 aa, Homo sapiens
  CDR3 for beta chain variable domain of TCR clone 394911 (TRBV20-1, TRBJ2-7)
CGARDRVSGMDEQYF

SEQ ID NO: 789823 - protein, 14 aa, Homo sapiens
  CDR3 for alpha chain variable domain of TCR clone 394912 (TRAV12-3, TRAJ47)
CAMSVREYGNKLVF

SEQ ID NO: 789824 - protein, 15 aa, Homo sapiens
  CDR3 for beta chain variable domain of TCR clone 394912 (TRBV20-1, TRBJ2-2)
SAVLEIRLNTGELFF

SEQ ID NO: 789825 - protein, 14 aa, Homo sapiens
  CDR3 for alpha chain variable domain of TCR clone 394913 (TRAV1-2, TRAJ16)
CAVNRFSDGQKLPF

SEQ ID NO: 789826 - protein, 13 aa, Homo sapiens
  CDR3 for beta chain variable domain of TCR clone 394913 (TRBV7-2, TRBJ2-7)
CASSSPSGSEQYF

SEQ ID NO: 789827 - protein, 11 aa, Homo sapiens
  CDR3 for alpha chain variable domain of TCR clone 394914 (TRAV21, TRAJ27)
CAVRMQANPPL

SEQ ID NO: 789828 - protein, 16 aa, Homo sapiens
  CDR3 for beta chain variable domain of TCR clone 394914 (TRBV25-1, TRBJ2-7)
CASSELTGGGIYEQYF

SEQ ID NO: 789829 - protein, 15 aa, Homo sapiens
  CDR3 for alpha chain variable domain of TCR clone 394915 (TRAV12-3, TRAJ27)
CAMRAYNTNAGKSTF

SEQ ID NO: 789830 - protein, 13 aa, Homo sapiens
  CDR3 for beta chain variable domain of TCR clone 394915 (TRBV12-4, TRBJ1-1)
CASSSRAGAEAFF

SEQ ID NO: 789831 - protein, 15 aa, Homo sapiens
  CDR3 for alpha chain variable domain of TCR clone 394916 (TRAV35, TRAJ40)
CAGQLGTSGTYKYIF

SEQ ID NO: 789832 - protein, 17 aa, Homo sapiens
  CDR3 for beta chain variable domain of TCR clone 394916 (TRBV7-3, TRBJ2-5)
CASSLGSGRSGSETQYF

SEQ ID NO: 789833 - protein, 14 aa, Homo sapiens
  CDR3 for alpha chain variable domain of TCR clone 394917 (TRAV12-3, TRAJ29)
CAMSPYSGNTPLVF

SEQ ID NO: 789834 - protein, 12 aa, Homo sapiens
  CDR3 for beta chain variable domain of TCR clone 394917 (TRBV9, TRBJ2-1)
CASSVWGTDIFF

SEQ ID NO: 789835 - protein, 15 aa, Homo sapiens
  CDR3 for alpha chain variable domain of TCR clone 394918 (TRAV21, TRAJ38)
CAARQDAGNNRKLIW

SEQ ID NO: 789836 - protein, 11 aa, Homo sapiens
  CDR3 for beta chain variable domain of TCR clone 394918 (TRBV12-4, TRBJ2-3)
CASTATDTQYF

SEQ ID NO: 789837 - protein, 11 aa, Homo sapiens
  CDR3 for alpha chain variable domain of TCR clone 394919 (TRAV12-2, )
CAVASLATTIS

SEQ ID NO: 789838 - protein, 16 aa, Homo sapiens
  CDR3 for beta chain variable domain of TCR clone 394919 (TRBV5-1, TRBJ2-2)
CASSSRTGGRTGELFL

SEQ ID NO: 789839 - protein, 15 aa, Homo sapiens
  CDR3 for alpha chain variable domain of TCR clone 394920 (TRAV12-3, TRAJ11)
CAMSEENSGYRTLTF

SEQ ID NO: 789840 - protein, 16 aa, Homo sapiens
  CDR3 for beta chain variable domain of TCR clone 394920 (TRBV5-1, TRBJ2-7)
CASSLEGLAGLYEQYF

SEQ ID NO: 789841 - protein, 19 aa, Homo sapiens
  CDR3 for alpha chain variable domain of TCR clone 394921 (TRAV13-1, TRAJ52)
CAAIPYQNAGGTSYGKLTF

SEQ ID NO: 789842 - protein, 13 aa, Homo sapiens
  CDR3 for beta chain variable domain of TCR clone 394921 (TRBV29-1, TRBJ2-5)
CSATTSGGETQYF

SEQ ID NO: 789843 - protein, 11 aa, Homo sapiens
  CDR3 for alpha chain variable domain of TCR clone 394922 (TRAV35, TRAJ22)
CAGPGVGQLTF

SEQ ID NO: 789844 - protein, 16 aa, Homo sapiens
  CDR3 for beta chain variable domain of TCR clone 394922 (TRBV7-3, TRBJ2-2)
CASSLKRGTLSGELFF

SEQ ID NO: 789845 - protein, 14 aa, Homo sapiens
  CDR3 for alpha chain variable domain of TCR clone 394923 (TRAV1-1, TRAJ27)
CAVIYNTNSGKSTF

SEQ ID NO: 789846 - protein, 12 aa, Homo sapiens
  CDR3 for beta chain variable domain of TCR clone 394923 (TRBV11-2, TRBJ2-1)
CASSPGNNEQFF

SEQ ID NO: 789847 - protein, 13 aa, Homo sapiens
  CDR3 for alpha chain variable domain of TCR clone 394924 (TRAV21, TRAJ27)
CAARPGNAGKSTF

SEQ ID NO: 789848 - protein, 16 aa, Homo sapiens
  CDR3 for beta chain variable domain of TCR clone 394924 (TRBV27, TRBJ2-5)
CASSYGPGGQKETQYF

SEQ ID NO: 789849 - protein, 14 aa, Homo sapiens
  CDR3 for alpha chain variable domain of TCR clone 394925 (TRAV12-1, TRAJ17)
CVVNYKAAGNKLTF

SEQ ID NO: 789850 - protein, 11 aa, Homo sapiens
  CDR3 for beta chain variable domain of TCR clone 394925 (TRBV20-1, TRBJ2-1)
GASGILHEQFF

SEQ ID NO: 789851 - protein, 15 aa, Homo sapiens
  CDR3 for alpha chain variable domain of TCR clone 394926 (TRAV21, TRAJ53)
CATLNSGGSNYKLTF

SEQ ID NO: 789852 - protein, 16 aa, Homo sapiens
  CDR3 for beta chain variable domain of TCR clone 394926 (TRBV7-8, TRBJ2-6)
CASRVGDSSGANVLTF

SEQ ID NO: 789853 - protein, 13 aa, Homo sapiens
  CDR3 for alpha chain variable domain of TCR clone 394927 (TRAV21, TRAJ27)
CAVRMQANQPLGM

SEQ ID NO: 789854 - protein, 16 aa, Homo sapiens
  CDR3 for beta chain variable domain of TCR clone 394927 (TRBV3-1, TRBJ2-7)
CASSQGATGVAYEQYF

SEQ ID NO: 789855 - protein, 13 aa, Homo sapiens
  CDR3 for alpha chain variable domain of TCR clone 394928 (TRAV36/DV7, TRAJ54)
CAVDIQGAQKLVF

SEQ ID NO: 789856 - protein, 14 aa, Homo sapiens
  CDR3 for beta chain variable domain of TCR clone 394928 (TRBV19, TRBJ2-7)
CASNFRDTFTGLYF

SEQ ID NO: 789857 - protein, 16 aa, Homo sapiens
  CDR3 for alpha chain variable domain of TCR clone 394929 (TRAV3, TRAJ10)
CAVRDMRAGGGNKLTF

SEQ ID NO: 789858 - protein, 14 aa, Homo sapiens
  CDR3 for beta chain variable domain of TCR clone 394929 (TRBV11-3, TRBJ1-6)
CASSFSGGDSPLHF

SEQ ID NO: 789859 - protein, 14 aa, Homo sapiens
  CDR3 for alpha chain variable domain of TCR clone 394930 (TRAV23/DV6, TRAJ11)
CSASLESGYSTLTF

SEQ ID NO: 789860 - protein, 15 aa, Homo sapiens
  CDR3 for beta chain variable domain of TCR clone 394930 (TRBV20-1, TRBJ1-5)
CSASAWDRVNQPQHF

SEQ ID NO: 789861 - protein, 22 aa, Homo sapiens
  CDR3 for alpha chain variable domain of TCR clone 394931 (TRAV12-2, TRAJ53)
SPVIQPPTSVPPILSSNYKLTF

SEQ ID NO: 789862 - protein, 16 aa, Homo sapiens
  CDR3 for beta chain variable domain of TCR clone 394931 (TRBV7-9, TRBJ1-2)
CASSLGFSSGEDGYTF

SEQ ID NO: 789863 - protein, 14 aa, Homo sapiens
  CDR3 for alpha chain variable domain of TCR clone 394932 (TRAV26-1, TRAJ26)
FIVRATFLGQNFVF

SEQ ID NO: 789864 - protein, 14 aa, Homo sapiens
  CDR3 for beta chain variable domain of TCR clone 394932 (TRBV12-4, TRBJ2-5)
CASSLWQKQETQYF

SEQ ID NO: 789865 - protein, 14 aa, Homo sapiens
  CDR3 for alpha chain variable domain of TCR clone 394933 (TRAV21, TRAJ35)
CAAMPIGFGNALHC

SEQ ID NO: 789866 - protein, 12 aa, Homo sapiens
  CDR3 for beta chain variable domain of TCR clone 394933 (TRBV7-9, TRBJ2-7)
CASSIKREEQYF

SEQ ID NO: 789867 - protein, 14 aa, Homo sapiens
  CDR3 for alpha chain variable domain of TCR clone 394934 (TRAV12-2, TRAJ24)
CAVTPADSWGKLQF

SEQ ID NO: 789868 - protein, 17 aa, Homo sapiens
  CDR3 for beta chain variable domain of TCR clone 394934 (TRBV20-1, TRBJ2-7)
CSATRAGGVAGVEEQYF

SEQ ID NO: 789869 - protein, 14 aa, Homo sapiens
  CDR3 for alpha chain variable domain of TCR clone 394935 (TRAV21, TRAJ9)
CCGGGGTGGFKTIF

SEQ ID NO: 789870 - protein, 13 aa, Homo sapiens
  CDR3 for beta chain variable domain of TCR clone 394935 (TRBV12-4, TRBJ1-2)
CASSSGLTVISSF

SEQ ID NO: 789871 - protein, 17 aa, Homo sapiens
  CDR3 for alpha chain variable domain of TCR clone 394936 (TRAV3, TRAJ6)
CAVRDGPRAGGSYIPTF

SEQ ID NO: 789872 - protein, 15 aa, Homo sapiens
  CDR3 for beta chain variable domain of TCR clone 394936 (TRBV10-3, TRBJ2-1)
CAISLGLVGGNEQFF

SEQ ID NO: 789873 - protein, 14 aa, Homo sapiens
  CDR3 for alpha chain variable domain of TCR clone 394937 (TRAV1-2, TRAJ8)
CAVREDTGFPKLVF

SEQ ID NO: 789874 - protein, 12 aa, Homo sapiens
  CDR3 for beta chain variable domain of TCR clone 394937 (TRBV29-1, TRBJ2-3)
CSVTGGADTQYF

SEQ ID NO: 789875 - protein, 14 aa, Homo sapiens
  CDR3 for alpha chain variable domain of TCR clone 394938 (TRAV8-6, TRAJ53)
CAALMLGSNYKLTF

SEQ ID NO: 789876 - protein, 15 aa, Homo sapiens
  CDR3 for beta chain variable domain of TCR clone 394938 (TRBV20-1, TRBJ2-3)
CSAEPLAGHGDTQYF

SEQ ID NO: 789877 - protein, 13 aa, Homo sapiens
  CDR3 for alpha chain variable domain of TCR clone 394939 (TRAV13-1, TRAJ39)
CSKYSNAGNMLTF

SEQ ID NO: 789878 - protein, 13 aa, Homo sapiens
  CDR3 for beta chain variable domain of TCR clone 394939 (TRBV20-1, TRBJ2-5)
CSARGDYQETQYF

SEQ ID NO: 789879 - protein, 13 aa, Homo sapiens
  CDR3 for alpha chain variable domain of TCR clone 394940 (TRAV13-1, TRAJ6)
CAASKGGSYIPTF

SEQ ID NO: 789880 - protein, 15 aa, Homo sapiens
  CDR3 for beta chain variable domain of TCR clone 394940 (TRBV7-2, TRBJ2-1)
CASTHGTGIYNEQFF

SEQ ID NO: 789881 - protein, 15 aa, Homo sapiens
  CDR3 for alpha chain variable domain of TCR clone 394941 (TRAV26-1, TRAJ44)
CIVRIGTGTASKLTF

SEQ ID NO: 789882 - protein, 16 aa, Homo sapiens
  CDR3 for beta chain variable domain of TCR clone 394941 (TRBV28, TRBJ2-3)
CASSFFRDPRLGTQYF

SEQ ID NO: 789883 - protein, 12 aa, Homo sapiens
  CDR3 for alpha chain variable domain of TCR clone 394942 (TRAV25, TRAJ54)
CAGGWGDQKLVF

SEQ ID NO: 789884 - protein, 12 aa, Homo sapiens
  CDR3 for beta chain variable domain of TCR clone 394942 (TRBV7-8, TRBJ2-7)
CASSLGDREQYF

SEQ ID NO: 789885 - protein, 15 aa, Homo sapiens
  CDR3 for alpha chain variable domain of TCR clone 394943 (TRAV1-2, TRAJ13)
CAVRGSAGGYQKVTF

SEQ ID NO: 789886 - protein, 15 aa, Homo sapiens
  CDR3 for beta chain variable domain of TCR clone 394943 (TRBV11-3, TRBJ1-3)
CASSLSGTSGNTIYF

SEQ ID NO: 789887 - protein, 15 aa, Homo sapiens
  CDR3 for alpha chain variable domain of TCR clone 394944 (TRAV12-1, TRAJ44)
CVVDEYTGTASKLTF

SEQ ID NO: 789888 - protein, 12 aa, Homo sapiens
  CDR3 for beta chain variable domain of TCR clone 394944 (TRBV11-2, TRBJ2-2)
CASSLGGGELFF

SEQ ID NO: 789889 - protein, 14 aa, Homo sapiens
  CDR3 for alpha chain variable domain of TCR clone 394945 (TRAV13-1, TRAJ8)
CAASEDTGFQKLVF

SEQ ID NO: 789890 - protein, 12 aa, Homo sapiens
  CDR3 for beta chain variable domain of TCR clone 394945 (TRBV11-2, TRBJ2-2)
CASSLGGGELFF

SEQ ID NO: 789891 - protein, 16 aa, Homo sapiens
  CDR3 for alpha chain variable domain of TCR clone 394946 (TRAV26-1, TRAJ52)
CIVSNAGGTSHGKLTF

SEQ ID NO: 789892 - protein, 16 aa, Homo sapiens
  CDR3 for beta chain variable domain of TCR clone 394946 (TRBV5-1, TRBJ2-1)
CASSLEGRGLYNEQFF

SEQ ID NO: 789893 - protein, 12 aa, Homo sapiens
  CDR3 for alpha chain variable domain of TCR clone 394947 (TRAV17, TRAJ30)
CATDARDDKIIF

SEQ ID NO: 789894 - protein, 15 aa, Homo sapiens
  CDR3 for beta chain variable domain of TCR clone 394947 (TRBV4-1, TRBJ2-1)
CASSQGGELYNEQIF

SEQ ID NO: 789895 - protein, 12 aa, Homo sapiens
  CDR3 for alpha chain variable domain of TCR clone 394948 (TRAV12-3, TRAJ40)
CAMSSGTYKYIF

SEQ ID NO: 789896 - protein, 15 aa, Homo sapiens
  CDR3 for beta chain variable domain of TCR clone 394948 (TRBV7-3, TRBJ2-2)
CASSKTGQGTGELFF

SEQ ID NO: 789897 - protein, 14 aa, Homo sapiens
  CDR3 for alpha chain variable domain of TCR clone 394949 (TRAV35, TRAJ22)
CAVLRPGSARQLTF

SEQ ID NO: 789898 - protein, 15 aa, Homo sapiens
  CDR3 for beta chain variable domain of TCR clone 394949 (TRBV12-4, TRBJ2-5)
CASSPPIGLQETQYF

SEQ ID NO: 789899 - protein, 10 aa, Homo sapiens
  CDR3 for alpha chain variable domain of TCR clone 394950 (TRAV12-2, TRAJ22)
CAVNETQLTF

SEQ ID NO: 789900 - protein, 14 aa, Homo sapiens
  CDR3 for beta chain variable domain of TCR clone 394950 (TRBV12-5, TRBJ2-5)
CASGSRTHQETQYF

SEQ ID NO: 789901 - protein, 10 aa, Homo sapiens
  CDR3 for alpha chain variable domain of TCR clone 394951 (TRAV1-2, TRAJ20)
CARIDYKLSF

SEQ ID NO: 789902 - protein, 16 aa, Homo sapiens
  CDR3 for beta chain variable domain of TCR clone 394951 (TRBV20-1, TRBJ1-1)
CSASALTQGMNTEAFF

SEQ ID NO: 789903 - protein, 15 aa, Homo sapiens
  CDR3 for alpha chain variable domain of TCR clone 394952 (TRAV12-3, TRAJ49)
CAMTAPGNTGNQFYF

SEQ ID NO: 789904 - protein, 17 aa, Homo sapiens
  CDR3 for beta chain variable domain of TCR clone 394952 (TRBV25-1, TRBJ2-5)
CASSRRGGRGGQETQYF

SEQ ID NO: 789905 - protein, 17 aa, Homo sapiens
  CDR3 for alpha chain variable domain of TCR clone 394953 (TRAV16, TRAJ42)
CALSPKLYGGSQGNLIF

SEQ ID NO: 789906 - protein, 12 aa, Homo sapiens
  CDR3 for beta chain variable domain of TCR clone 394953 (TRBV5-7, TRBJ2-7)
CASSVQGGEQYF

SEQ ID NO: 789907 - protein, 13 aa, Homo sapiens
  CDR3 for alpha chain variable domain of TCR clone 394954 (TRAV13-2, TRAJ48)
CAEMDFGDEKLTF

SEQ ID NO: 789908 - protein, 15 aa, Homo sapiens
  CDR3 for beta chain variable domain of TCR clone 394954 (TRBV7-9, TRBJ1-6)
CASSSPGRGNSPLHC

SEQ ID NO: 789909 - protein, 12 aa, Homo sapiens
  CDR3 for alpha chain variable domain of TCR clone 394955 (TRAV8-6, TRAJ8)
CAVTPGLQKLVF

SEQ ID NO: 789910 - protein, 16 aa, Homo sapiens
  CDR3 for beta chain variable domain of TCR clone 394955 (TRBV7-3, TRBJ2-2)
CASSLKRGTLSGELFF

SEQ ID NO: 789911 - protein, 13 aa, Homo sapiens
  CDR3 for alpha chain variable domain of TCR clone 394956 (TRAV12-3, TRAJ9)
CAMRNTGGYKTIF

SEQ ID NO: 789912 - protein, 13 aa, Homo sapiens
  CDR3 for beta chain variable domain of TCR clone 394956 (TRBV9, TRBJ2-1)
CASSVGQGGEQFF

SEQ ID NO: 789913 - protein, 15 aa, Homo sapiens
  CDR3 for alpha chain variable domain of TCR clone 394957 (TRAV21, TRAJ10)
CAVRGLTGGGNKLTF

SEQ ID NO: 789914 - protein, 12 aa, Homo sapiens
  CDR3 for beta chain variable domain of TCR clone 394957 (TRBV14, TRBJ2-7)
CASSLNQRGQYF

SEQ ID NO: 789915 - protein, 13 aa, Homo sapiens
  CDR3 for alpha chain variable domain of TCR clone 394958 (TRAV21, TRAJ27)
CAARPGNAGKSTF

SEQ ID NO: 789916 - protein, 13 aa, Homo sapiens
  CDR3 for beta chain variable domain of TCR clone 394958 (TRBV11-2, TRBJ2-5)
CASGHGAKETQYF

SEQ ID NO: 789917 - protein, 14 aa, Homo sapiens
  CDR3 for alpha chain variable domain of TCR clone 394959 (TRAV12-2, TRAJ17)
CAALFKAVGNKLTF

SEQ ID NO: 789918 - protein, 16 aa, Homo sapiens
  CDR3 for beta chain variable domain of TCR clone 394959 (TRBV20-1, TRBJ2-2)
CSASASGIPGAGELFF

SEQ ID NO: 789919 - protein, 13 aa, Homo sapiens
  CDR3 for alpha chain variable domain of TCR clone 394960 (TRAV3, TRAJ43)
CAVRDTRGGDMRF

SEQ ID NO: 789920 - protein, 15 aa, Homo sapiens
  CDR3 for beta chain variable domain of TCR clone 394960 (TRBV6-5, TRBJ1-5)
CASSYSRRSNHPQHF

SEQ ID NO: 789921 - protein, 16 aa, Homo sapiens
  CDR3 for alpha chain variable domain of TCR clone 394961 (TRAV26-2, TRAJ45)
CTIASPIGGGADGLTF

SEQ ID NO: 789922 - protein, 20 aa, Homo sapiens
  CDR3 for beta chain variable domain of TCR clone 394961 (TRBV28, TRBJ2-1)
CASTPIGRSPGLAGGNEQFF

SEQ ID NO: 789923 - protein, 15 aa, Homo sapiens
  CDR3 for alpha chain variable domain of TCR clone 394962 (TRAV27, TRAJ38)
CAARRNAGNNRQLIW

SEQ ID NO: 789924 - protein, 13 aa, Homo sapiens
  CDR3 for beta chain variable domain of TCR clone 394962 (TRBV20-1, TRBJ1-1)
CSARAGGNTEAFF

SEQ ID NO: 789925 - protein, 13 aa, Homo sapiens
  CDR3 for alpha chain variable domain of TCR clone 394963 (TRAV8-6, TRAJ49)
CAVITNTGNQFYF

SEQ ID NO: 789926 - protein, 14 aa, Homo sapiens
  CDR3 for beta chain variable domain of TCR clone 394963 (TRBV19, TRBJ2-1)
CARPTFVLSGEQFF

SEQ ID NO: 789927 - protein, 15 aa, Homo sapiens
  CDR3 for alpha chain variable domain of TCR clone 394964 (TRAV12-2, TRAJ53)
CAVNGGGGSNYKLTF

SEQ ID NO: 789928 - protein, 14 aa, Homo sapiens
  CDR3 for beta chain variable domain of TCR clone 394964 (TRBV6-1, TRBJ1-3)
CGSVQGGGGNTIYF

SEQ ID NO: 789929 - protein, 17 aa, Homo sapiens
  CDR3 for alpha chain variable domain of TCR clone 394965 (TRAV3, TRAJ6)
CAVRDAPRAGGSYIPTL

SEQ ID NO: 789930 - protein, 14 aa, Homo sapiens
  CDR3 for beta chain variable domain of TCR clone 394965 (TRBV7-2, TRBJ2-7)
CASSPKTSFYEQYF

SEQ ID NO: 789931 - protein, 12 aa, Homo sapiens
  CDR3 for alpha chain variable domain of TCR clone 394966 (TRAV12-3, TRAJ17)
CAMTLTGNKLTF

SEQ ID NO: 789932 - protein, 13 aa, Homo sapiens
  CDR3 for beta chain variable domain of TCR clone 394966 (TRBV27, TRBJ1-6)
CASSGTGDSPLHF

SEQ ID NO: 789933 - protein, 15 aa, Homo sapiens
  CDR3 for alpha chain variable domain of TCR clone 394967 (TRAV26-1, TRAJ29)
CIVRVEGSGNTPLVF

SEQ ID NO: 789934 - protein, 15 aa, Homo sapiens
  CDR3 for beta chain variable domain of TCR clone 394967 (TRBV7-9, TRBJ2-3)
CASSRQGAGEDTQYF

SEQ ID NO: 789935 - protein, 14 aa, Homo sapiens
  CDR3 for alpha chain variable domain of TCR clone 394968 (TRAV8-3, TRAJ4)
CPVGASGGYNKLIF

SEQ ID NO: 789936 - protein, 16 aa, Homo sapiens
  CDR3 for beta chain variable domain of TCR clone 394968 (TRBV4-3, TRBJ2-2)
CASSHLQGSGTGELFF

SEQ ID NO: 789937 - protein, 11 aa, Homo sapiens
  CDR3 for alpha chain variable domain of TCR clone 394969 (TRAV1-2, TRAJ20)
CAVSNDYKLSF

SEQ ID NO: 789938 - protein, 16 aa, Homo sapiens
  CDR3 for beta chain variable domain of TCR clone 394969 (TRBV29-1, TRBJ2-6)
CSVDGITYSGANVLTF

SEQ ID NO: 789939 - protein, 16 aa, Homo sapiens
  CDR3 for alpha chain variable domain of TCR clone 394970 (TRAV22, TRAJ45)
CTVERGKRGGADGLTF

SEQ ID NO: 789940 - protein, 13 aa, Homo sapiens
  CDR3 for beta chain variable domain of TCR clone 394970 (TRBV27, TRBJ1-1)
CASSLSIGAEAFF

SEQ ID NO: 789941 - protein, 15 aa, Homo sapiens
  CDR3 for alpha chain variable domain of TCR clone 394971 (TRAV17, TRAJ37)
CATDHGSSNTGKLIF

SEQ ID NO: 789942 - protein, 14 aa, Homo sapiens
  CDR3 for beta chain variable domain of TCR clone 394971 (TRBV7-2, TRBJ2-3)
CASSRTSGAETQYL

SEQ ID NO: 789943 - protein, 16 aa, Homo sapiens
  CDR3 for alpha chain variable domain of TCR clone 394972 (TRAV8-3, TRAJ8)
CAVPRDGNTGFQKLVF

SEQ ID NO: 789944 - protein, 13 aa, Homo sapiens
  CDR3 for beta chain variable domain of TCR clone 394972 (TRBV28, TRBJ2-5)
CAGVSRGEETQYF

SEQ ID NO: 789945 - protein, 16 aa, Homo sapiens
  CDR3 for alpha chain variable domain of TCR clone 394973 (TRAV1-2, TRAJ10)
CAVRGVLTGGGNKLTF

SEQ ID NO: 789946 - protein, 16 aa, Homo sapiens
  CDR3 for beta chain variable domain of TCR clone 394973 (TRBV19, TRBJ1-1)
CASRFGGPVTGTEAFF

SEQ ID NO: 789947 - protein, 11 aa, Homo sapiens
  CDR3 for alpha chain variable domain of TCR clone 394974 (TRAV2, TRAJ13)
CASGGYQKVTF

SEQ ID NO: 789948 - protein, 20 aa, Homo sapiens
  CDR3 for beta chain variable domain of TCR clone 394974 (TRBV6-1, TRBJ2-5)
CASSEPLDRGGDPVLRARHA

SEQ ID NO: 789949 - protein, 14 aa, Homo sapiens
  CDR3 for alpha chain variable domain of TCR clone 394975 (TRAV3, TRAJ4)
CCERWDWGYNKLIF

SEQ ID NO: 789950 - protein, 13 aa, Homo sapiens
  CDR3 for beta chain variable domain of TCR clone 394975 (TRBV10-3, TRBJ2-7)
CASKLAVNYEQYF

SEQ ID NO: 789951 - protein, 12 aa, Homo sapiens
  CDR3 for alpha chain variable domain of TCR clone 394976 (TRAV36/DV7, TRAJ54)
CAVVRGAQKLVF

SEQ ID NO: 789952 - protein, 16 aa, Homo sapiens
  CDR3 for beta chain variable domain of TCR clone 394976 (TRBV12-5, TRBJ2-5)
CASGPRTSGNQETQYF

SEQ ID NO: 789953 - protein, 17 aa, Homo sapiens
  CDR3 for alpha chain variable domain of TCR clone 394977 (TRAV8-6, TRAJ58)
CAVSSWGGETSGSRLTF

SEQ ID NO: 789954 - protein, 15 aa, Homo sapiens
  CDR3 for beta chain variable domain of TCR clone 394977 (TRBV28, TRBJ2-1)
CASSLGTRLYNEQFF

SEQ ID NO: 789955 - protein, 15 aa, Homo sapiens
  CDR3 for alpha chain variable domain of TCR clone 394978 (TRAV1-2, TRAJ28)
CAVQYSGAASYQLTF

SEQ ID NO: 789956 - protein, 13 aa, Homo sapiens
  CDR3 for beta chain variable domain of TCR clone 394978 (TRBV20-1, TRBJ2-7)
CSATHTSGYEQYF

SEQ ID NO: 789957 - protein, 13 aa, Homo sapiens
  CDR3 for alpha chain variable domain of TCR clone 394979 (TRAV13-1, TRAJ53)
QAASGGSNYKLTF

SEQ ID NO: 789958 - protein, 15 aa, Homo sapiens
  CDR3 for beta chain variable domain of TCR clone 394979 (TRBV5-1, TRBJ2-1)
CASSPPGAPYNEQFF

SEQ ID NO: 789959 - protein, 12 aa, Homo sapiens
  CDR3 for alpha chain variable domain of TCR clone 394980 (TRAV27, TRAJ35)
CAGADFGNVLHC

SEQ ID NO: 789960 - protein, 16 aa, Homo sapiens
  CDR3 for beta chain variable domain of TCR clone 394980 (TRBV6-1, TRBJ2-1)
WASILRQGSSYNEQFF

SEQ ID NO: 789961 - protein, 15 aa, Homo sapiens
  CDR3 for alpha chain variable domain of TCR clone 394981 (TRAV12-3, TRAJ4)
CAMTRGSGGYNKLIF

SEQ ID NO: 789962 - protein, 12 aa, Homo sapiens
  CDR3 for beta chain variable domain of TCR clone 394981 (TRBV7-8, TRBJ2-7)
CASSLGDREQYF

SEQ ID NO: 789963 - protein, 11 aa, Homo sapiens
  CDR3 for alpha chain variable domain of TCR clone 394982 (TRAV3, TRAJ21)
CAVGNFNKFYF

SEQ ID NO: 789964 - protein, 16 aa, Homo sapiens
  CDR3 for beta chain variable domain of TCR clone 394982 (TRBV19, TRBJ2-1)
CSGSKAGPSSYNEQFF

SEQ ID NO: 789965 - protein, 15 aa, Homo sapiens
  CDR3 for alpha chain variable domain of TCR clone 394983 (TRAV12-3, TRAJ11)
CAMSEENSGYSTLTF

SEQ ID NO: 789966 - protein, 15 aa, Homo sapiens
  CDR3 for beta chain variable domain of TCR clone 394983 (TRBV27, TRBJ1-4)
CASSAQQDLSEKLFF

SEQ ID NO: 789967 - protein, 14 aa, Homo sapiens
  CDR3 for alpha chain variable domain of TCR clone 394984 (TRAV35, TRAJ50)
CAGHRKTAYDKVIF

SEQ ID NO: 789968 - protein, 13 aa, Homo sapiens
  CDR3 for beta chain variable domain of TCR clone 394984 (TRBV7-7, TRBJ2-3)
CASSLSRADTQYF

SEQ ID NO: 789969 - protein, 14 aa, Homo sapiens
  CDR3 for alpha chain variable domain of TCR clone 394985 (TRAV4, TRAJ9)
CLVGSGTGGFKTIF

SEQ ID NO: 789970 - protein, 14 aa, Homo sapiens
  CDR3 for beta chain variable domain of TCR clone 394985 (TRBV7-9, TRBJ2-4)
CASSLAMEGNIQYF

SEQ ID NO: 789971 - protein, 16 aa, Homo sapiens
  CDR3 for alpha chain variable domain of TCR clone 394986 (TRAV16, TRAJ4)
CALSRIFSGGYNQLIF

SEQ ID NO: 789972 - protein, 16 aa, Homo sapiens
  CDR3 for beta chain variable domain of TCR clone 394986 (TRBV24-1, TRBJ2-3)
CATSDPGTGATDTQYF

SEQ ID NO: 789973 - protein, 16 aa, Homo sapiens
  CDR3 for alpha chain variable domain of TCR clone 394987 (TRAV12-2, TRAJ43)
CAGADMRFGAGTSLTV

SEQ ID NO: 789974 - protein, 16 aa, Homo sapiens
  CDR3 for beta chain variable domain of TCR clone 394987 (TRBV2, TRBJ2-4)
CASSEAPGGEQNSQYF

SEQ ID NO: 789975 - protein, 13 aa, Homo sapiens
  CDR3 for alpha chain variable domain of TCR clone 394988 (TRAV8-6, TRAJ50)
CSVIKTSYDKVIF

SEQ ID NO: 789976 - protein, 15 aa, Homo sapiens
  CDR3 for beta chain variable domain of TCR clone 394988 (TRBV7-2, TRBJ2-2)
CASSRPGQNTGELFF

SEQ ID NO: 789977 - protein, 14 aa, Homo sapiens
  CDR3 for alpha chain variable domain of TCR clone 394989 (TRAV12-1, TRAJ17)
CVVNYKAAGNKLTF

SEQ ID NO: 789978 - protein, 14 aa, Homo sapiens
  CDR3 for beta chain variable domain of TCR clone 394989 (TRBV2, TRBJ2-1)
CASSAALDGNEQFF

SEQ ID NO: 789979 - protein, 16 aa, Homo sapiens
  CDR3 for alpha chain variable domain of TCR clone 394990 (TRAV3, TRAJ10)
CAVRDMRAGGGNKLTL

SEQ ID NO: 789980 - protein, 20 aa, Homo sapiens
  CDR3 for beta chain variable domain of TCR clone 394990 (TRBV11-3, TRBJ2-7)
CASSQRTSGSLRAVLRAGHQ

SEQ ID NO: 789981 - protein, 13 aa, Homo sapiens
  CDR3 for alpha chain variable domain of TCR clone 394991 (TRAV8-3, TRAJ36)
CAVGATGANNLFF

SEQ ID NO: 789982 - protein, 15 aa, Homo sapiens
  CDR3 for beta chain variable domain of TCR clone 394991 (TRBV7-2, TRBJ1-2)
CASSPRAGWNYGYTY

SEQ ID NO: 789983 - protein, 13 aa, Homo sapiens
  CDR3 for alpha chain variable domain of TCR clone 394992 (TRAV16, TRAJ10)
CALLTGGGNKLTF

SEQ ID NO: 789984 - protein, 12 aa, Homo sapiens
  CDR3 for beta chain variable domain of TCR clone 394992 (TRBV28, TRBJ2-7)
CASTGNHYEQYV

SEQ ID NO: 789985 - protein, 12 aa, Homo sapiens
  CDR3 for alpha chain variable domain of TCR clone 394993 (TRAV25, TRAJ29)
CAGPRGNTPLVF

SEQ ID NO: 789986 - protein, 14 aa, Homo sapiens
  CDR3 for beta chain variable domain of TCR clone 394993 (TRBV12-5, TRBJ2-5)
CASGSRTHQETQYF

SEQ ID NO: 789987 - protein, 14 aa, Homo sapiens
  CDR3 for alpha chain variable domain of TCR clone 394994 (TRAV8-6, TRAJ12)
CAVKAADRSYKLIF

SEQ ID NO: 789988 - protein, 15 aa, Homo sapiens
  CDR3 for beta chain variable domain of TCR clone 394994 (TRBV5-1, TRBJ2-5)
CASSLGLAEQGTQYF

SEQ ID NO: 789989 - protein, 18 aa, Homo sapiens
  CDR3 for alpha chain variable domain of TCR clone 394995 (TRAV1-2, TRAJ18)
CAVRDMGDRGTTLGRLYF

SEQ ID NO: 789990 - protein, 16 aa, Homo sapiens
  CDR3 for beta chain variable domain of TCR clone 394995 (TRBV29-1, TRBJ1-2)
CSVEANRDIANYGYTF

SEQ ID NO: 789991 - protein, 16 aa, Homo sapiens
  CDR3 for alpha chain variable domain of TCR clone 394996 (TRAV8-3, TRAJ10)
CAVGPILTGGGNKLTF

SEQ ID NO: 789992 - protein, 12 aa, Homo sapiens
  CDR3 for beta chain variable domain of TCR clone 394996 (TRBV11-2, TRBJ2-1)
CASSPGNNEQFF

SEQ ID NO: 789993 - protein, 12 aa, Homo sapiens
  CDR3 for alpha chain variable domain of TCR clone 394997 (TRAV12-3, TRAJ40)
CAMSSGTYKYIF

SEQ ID NO: 789994 - protein, 15 aa, Homo sapiens
  CDR3 for beta chain variable domain of TCR clone 394997 (TRBV7-3, TRBJ2-2)
CASSQTGQGTGELFF

SEQ ID NO: 789995 - protein, 14 aa, Homo sapiens
  CDR3 for alpha chain variable domain of TCR clone 394998 (TRAV35, TRAJ34)
CAGRGTPTSSSLVL

SEQ ID NO: 789996 - protein, 14 aa, Homo sapiens
  CDR3 for beta chain variable domain of TCR clone 394998 (TRBV5-1, TRBJ2-7)
CASSRGESLYEQYF

SEQ ID NO: 789997 - protein, 14 aa, Homo sapiens
  CDR3 for alpha chain variable domain of TCR clone 394999 (TRAV16, TRAJ17)
CALSGRAAGNKLTF

SEQ ID NO: 789998 - protein, 17 aa, Homo sapiens
  CDR3 for beta chain variable domain of TCR clone 394999 (TRBV18, TRBJ2-6)
CASLPRQGAVGANVLTF

SEQ ID NO: 789999 - protein, 13 aa, Homo sapiens
  CDR3 for alpha chain variable domain of TCR clone 395000 (TRAV13-1, TRAJ11)
CAAVLAGYSTLTF

SEQ ID NO: 790000 - protein, 17 aa, Homo sapiens
  CDR3 for beta chain variable domain of TCR clone 395000 (TRBV25-1, TRBJ2-7)
GASSDARVVFSSYEQYF

SEQ ID NO: 790001 - protein, 15 aa, Homo sapiens
  CDR3 for alpha chain variable domain of TCR clone 395001 (TRAV8-2, TRAJ28)
CVVSESGAGSYQLTF

SEQ ID NO: 790002 - protein, 17 aa, Homo sapiens
  CDR3 for beta chain variable domain of TCR clone 395001 (TRBV13, TRBJ2-3)
CASSLSRVAGGRNTQHF

SEQ ID NO: 790003 - protein, 10 aa, Homo sapiens
  CDR3 for alpha chain variable domain of TCR clone 395002 (TRAV8-4, TRAJ43)
CAVSADDMRF

SEQ ID NO: 790004 - protein, 15 aa, Homo sapiens
  CDR3 for beta chain variable domain of TCR clone 395002 (TRBV19, TRBJ2-3)
CAAGDTNAPNDTQYF

SEQ ID NO: 790005 - protein, 18 aa, Homo sapiens
  CDR3 for alpha chain variable domain of TCR clone 395003 (TRAV16, TRAJ10)
CAPAGRRKQTHLWDRHSA

SEQ ID NO: 790006 - protein, 14 aa, Homo sapiens
  CDR3 for beta chain variable domain of TCR clone 395003 (TRBV7-2, TRBJ2-7)
CANRSQGAAYEQYF

SEQ ID NO: 790007 - protein, 15 aa, Homo sapiens
  CDR3 for alpha chain variable domain of TCR clone 395004 (TRAV12-2, TRAJ53)
CAVNGGGGSKYKLTF

SEQ ID NO: 790008 - protein, 14 aa, Homo sapiens
  CDR3 for beta chain variable domain of TCR clone 395004 (TRBV19, TRBJ2-2)
CASSTLHRSGELFF

SEQ ID NO: 790009 - protein, 16 aa, Homo sapiens
  CDR3 for alpha chain variable domain of TCR clone 395005 (TRAV38-2/DV8, TRAJ47)
CAYRSAIMEYGNKLVF

SEQ ID NO: 790010 - protein, 14 aa, Homo sapiens
  CDR3 for beta chain variable domain of TCR clone 395005 (TRBV19, TRBJ2-7)
CASSIFAGTYEQYL

SEQ ID NO: 790011 - protein, 11 aa, Homo sapiens
  CDR3 for alpha chain variable domain of TCR clone 395006 (TRAV21, TRAJ34)
CAVTSTDKLIF

SEQ ID NO: 790012 - protein, 17 aa, Homo sapiens
  CDR3 for beta chain variable domain of TCR clone 395006 (TRBV20-1, TRBJ2-1)
CSARSPSGGPPTMSSSS

SEQ ID NO: 790013 - protein, 13 aa, Homo sapiens
  CDR3 for alpha chain variable domain of TCR clone 395007 (TRAV13-1, TRAJ6)
CAARKGGSYIPTF

SEQ ID NO: 790014 - protein, 13 aa, Homo sapiens
  CDR3 for beta chain variable domain of TCR clone 395007 (TRBV7-9, TRBJ2-5)
CASLPSGRETQYF

SEQ ID NO: 790015 - protein, 14 aa, Homo sapiens
  CDR3 for alpha chain variable domain of TCR clone 395008 (TRAV3, TRAJ21)
CALGRGSTNFTLDL

SEQ ID NO: 790016 - protein, 13 aa, Homo sapiens
  CDR3 for beta chain variable domain of TCR clone 395008 (TRBV7-9, TRBJ1-2)
CASSLKQNYGYTF

SEQ ID NO: 790017 - protein, 12 aa, Homo sapiens
  CDR3 for alpha chain variable domain of TCR clone 395009 (TRAV25, TRAJ31)
CAGHLNNARLMF

SEQ ID NO: 790018 - protein, 12 aa, Homo sapiens
  CDR3 for beta chain variable domain of TCR clone 395009 (TRBV11-2, TRBJ2-2)
CDSSLGGGELFF

SEQ ID NO: 790019 - protein, 14 aa, Homo sapiens
  CDR3 for alpha chain variable domain of TCR clone 395010 (TRAV36/DV7, TRAJ48)
CAQRRDFGNEKLTF

SEQ ID NO: 790020 - protein, 14 aa, Homo sapiens
  CDR3 for beta chain variable domain of TCR clone 395010 (TRBV28, TRBJ2-4)
CASTQVTGVNNQYF

SEQ ID NO: 790021 - protein, 17 aa, Homo sapiens
  CDR3 for alpha chain variable domain of TCR clone 395011 (TRAV3, TRAJ6)
CAVRDGPRAGGSYIPKF

SEQ ID NO: 790022 - protein, 14 aa, Homo sapiens
  CDR3 for beta chain variable domain of TCR clone 395011 (TRBV7-2, TRBJ2-7)
CARSPKTSFYEQYF

SEQ ID NO: 790023 - protein, 14 aa, Homo sapiens
  CDR3 for alpha chain variable domain of TCR clone 395012 (TRAV12-2, TRAJ13)
CAVKTTGGYQKVTF

SEQ ID NO: 790024 - protein, 14 aa, Homo sapiens
  CDR3 for beta chain variable domain of TCR clone 395012 (TRBV5-5, TRBJ2-7)
CASSLGQGTYEQYF

SEQ ID NO: 790025 - protein, 14 aa, Homo sapiens
  CDR3 for alpha chain variable domain of TCR clone 395013 (TRAV29/DV5, TRAJ20)
CAASAPIEDYKLSF

SEQ ID NO: 790026 - protein, 15 aa, Homo sapiens
  CDR3 for beta chain variable domain of TCR clone 395013 (TRBV6-1, TRBJ2-1)
CASGEAAYSYNEQFF

SEQ ID NO: 790027 - protein, 14 aa, Homo sapiens
  CDR3 for alpha chain variable domain of TCR clone 395014 (TRAV38-1, TRAJ40)
CALRPTSGTYKYIF

SEQ ID NO: 790028 - protein, 11 aa, Homo sapiens
  CDR3 for beta chain variable domain of TCR clone 395014 (TRBV7-2, TRBJ2-3)
CASSSSDTQYF

SEQ ID NO: 790029 - protein, 16 aa, Homo sapiens
  CDR3 for alpha chain variable domain of TCR clone 395015 (TRAV30, TRAJ24)
CGTEIVDADSLGKFQF

SEQ ID NO: 790030 - protein, 15 aa, Homo sapiens
  CDR3 for beta chain variable domain of TCR clone 395015 (TRBV18, TRBJ2-1)
CASLPDRGRDNEQFF

SEQ ID NO: 790031 - protein, 18 aa, Homo sapiens
  CDR3 for alpha chain variable domain of TCR clone 395016 (TRAV12-3, TRAJ52)
CAMSVGGAGGTSYGKLTF

SEQ ID NO: 790032 - protein, 16 aa, Homo sapiens
  CDR3 for beta chain variable domain of TCR clone 395016 (TRBV28, TRBJ1-4)
CASSSRTGAANEKLFF

SEQ ID NO: 790033 - protein, 11 aa, Homo sapiens
  CDR3 for alpha chain variable domain of TCR clone 395017 (TRAV12-2, TRAJ43)
CASPIGNDMRF

SEQ ID NO: 790034 - protein, 13 aa, Homo sapiens
  CDR3 for beta chain variable domain of TCR clone 395017 (TRBV7-3, TRBJ1-2)
CASSLKWGYGYTF

SEQ ID NO: 790035 - protein, 14 aa, Homo sapiens
  CDR3 for alpha chain variable domain of TCR clone 395018 (TRAV12-2, TRAJ17)
CAVLFKAAGNKLSF

SEQ ID NO: 790036 - protein, 17 aa, Homo sapiens
  CDR3 for beta chain variable domain of TCR clone 395018 (TRBV20-1, TRBJ2-2)
CSASGSGQGGLTGELFF

SEQ ID NO: 790037 - protein, 12 aa, Homo sapiens
  CDR3 for alpha chain variable domain of TCR clone 395019 (TRAV21, TRAJ31)
CAVSPARDRLMF

SEQ ID NO: 790038 - protein, 14 aa, Homo sapiens
  CDR3 for beta chain variable domain of TCR clone 395019 (TRBV28, TRBJ2-7)
CASSLLRISYEQYF

SEQ ID NO: 790039 - protein, 12 aa, Homo sapiens
  CDR3 for alpha chain variable domain of TCR clone 395020 (TRAV1-1, TRAJ39)
CAVPVVGNMLTF

SEQ ID NO: 790040 - protein, 15 aa, Homo sapiens
  CDR3 for beta chain variable domain of TCR clone 395020 (TRBV27, TRBJ2-1)
CASSDGGGSSNEQFF

SEQ ID NO: 790041 - protein, 16 aa, Homo sapiens
  CDR3 for alpha chain variable domain of TCR clone 395021 (TRAV3, TRAJ37)
CAVRGKGSGNTGKLIF

SEQ ID NO: 790042 - protein, 15 aa, Homo sapiens
  CDR3 for beta chain variable domain of TCR clone 395021 (TRBV7-3, TRBJ2-1)
CASSLAGAGADEQFF

SEQ ID NO: 790043 - protein, 18 aa, Homo sapiens
  CDR3 for alpha chain variable domain of TCR clone 395022 (TRAV38-2/DV8, TRAJ42)
CAYRSADLTGGSQGNLIV

SEQ ID NO: 790044 - protein, 12 aa, Homo sapiens
  CDR3 for beta chain variable domain of TCR clone 395022 (TRBV11-2, TRBJ2-2)
CASSLGGGELFF

SEQ ID NO: 790045 - protein, 14 aa, Homo sapiens
  CDR3 for alpha chain variable domain of TCR clone 395023 (TRAV1-2, TRAJ8)
CAVREETGFQKLVF

SEQ ID NO: 790046 - protein, 11 aa, Homo sapiens
  CDR3 for beta chain variable domain of TCR clone 395023 (TRBV11-3, TRBJ2-7)
CASSRTYEQYF

SEQ ID NO: 790047 - protein, 12 aa, Homo sapiens
  CDR3 for alpha chain variable domain of TCR clone 395024 (TRAV17, TRAJ48)
CALNFGNEKLTF

SEQ ID NO: 790048 - protein, 13 aa, Homo sapiens
  CDR3 for beta chain variable domain of TCR clone 395024 (TRBV6-5, TRBJ2-5)
CASRSPGGETQYF

SEQ ID NO: 790049 - protein, 16 aa, Homo sapiens
  CDR3 for alpha chain variable domain of TCR clone 395025 (TRAV12-2, TRAJ6)
CAVRIQASVGSYIPTF

SEQ ID NO: 790050 - protein, 14 aa, Homo sapiens
  CDR3 for beta chain variable domain of TCR clone 395025 (TRBV2, TRBJ2-2)
CASSERRFTGELFF

SEQ ID NO: 790051 - protein, 14 aa, Homo sapiens
  CDR3 for alpha chain variable domain of TCR clone 395026 (TRAV34, TRAJ44)
CVADGTGTASKLTF

SEQ ID NO: 790052 - protein, 15 aa, Homo sapiens
  CDR3 for beta chain variable domain of TCR clone 395026 (TRBV5-1, TRBJ2-1)
CASSPPRAPYNEQFF

SEQ ID NO: 790053 - protein, 14 aa, Homo sapiens
  CDR3 for alpha chain variable domain of TCR clone 395027 (TRAV13-1, TRAJ4)
CAATLPRCYNKLIF

SEQ ID NO: 790054 - protein, 14 aa, Homo sapiens
  CDR3 for beta chain variable domain of TCR clone 395027 (TRBV19, TRBJ2-1)
CASPTFVLSGEQFF

SEQ ID NO: 790055 - protein, 15 aa, Homo sapiens
  CDR3 for alpha chain variable domain of TCR clone 395028 (TRAV20, TRAJ32)
CAVQAKRGATNKLIF

SEQ ID NO: 790056 - protein, 13 aa, Homo sapiens
  CDR3 for beta chain variable domain of TCR clone 395028 (TRBV7-3, TRBJ1-1)
CASSQDWGAEAFF

SEQ ID NO: 790057 - protein, 14 aa, Homo sapiens
  CDR3 for alpha chain variable domain of TCR clone 395029 (TRAV16, TRAJ15)
CALSFNQAGTALIF

SEQ ID NO: 790058 - protein, 14 aa, Homo sapiens
  CDR3 for beta chain variable domain of TCR clone 395029 (TRBV19, TRBJ2-2)
CTTTGHANTGELFF

SEQ ID NO: 790059 - protein, 12 aa, Homo sapiens
  CDR3 for alpha chain variable domain of TCR clone 395030 (TRAV12-1, TRAJ16)
CVVFRDGQKLLF

SEQ ID NO: 790060 - protein, 12 aa, Homo sapiens
  CDR3 for beta chain variable domain of TCR clone 395030 (TRBV7-8, TRBJ2-7)
CASSLGDREQYF

SEQ ID NO: 790061 - protein, 14 aa, Homo sapiens
  CDR3 for alpha chain variable domain of TCR clone 395031 (TRAV36/DV7, TRAJ13)
WGSGENGGYQKVTF

SEQ ID NO: 790062 - protein, 16 aa, Homo sapiens
  CDR3 for beta chain variable domain of TCR clone 395031 (TRBV19, TRBJ2-1)
CASSKAGPSSYNEQFF

SEQ ID NO: 790063 - protein, 15 aa, Homo sapiens
  CDR3 for alpha chain variable domain of TCR clone 395032 (TRAV12-2, TRAJ56)
CAVNPFPGANSKLTF

SEQ ID NO: 790064 - protein, 13 aa, Homo sapiens
  CDR3 for beta chain variable domain of TCR clone 395032 (TRBV20-1, TRBJ1-2)
CSARDRVYGGYSF

SEQ ID NO: 790065 - protein, 10 aa, Homo sapiens
  CDR3 for alpha chain variable domain of TCR clone 395033 (TRAV1-1, TRAJ37)
CAVDTGKLIF

SEQ ID NO: 790066 - protein, 15 aa, Homo sapiens
  CDR3 for beta chain variable domain of TCR clone 395033 (TRBV5-4, TRBJ2-7)
CASSPSGSASYEQYF

SEQ ID NO: 790067 - protein, 14 aa, Homo sapiens
  CDR3 for alpha chain variable domain of TCR clone 395034 (TRAV17, TRAJ5)
CATSTDTGRRALTF

SEQ ID NO: 790068 - protein, 15 aa, Homo sapiens
  CDR3 for beta chain variable domain of TCR clone 395034 (TRBV20-1, TRBJ1-1)
CSASRGVTGNTEAFF

SEQ ID NO: 790069 - protein, 12 aa, Homo sapiens
  CDR3 for alpha chain variable domain of TCR clone 395035 (TRAV26-1, TRAJ26)
CIVYNYGQNFVF

SEQ ID NO: 790070 - protein, 15 aa, Homo sapiens
  CDR3 for beta chain variable domain of TCR clone 395035 (TRBV27, TRBJ2-5)
CASSLIPSGGETQYF

SEQ ID NO: 790071 - protein, 16 aa, Homo sapiens
  CDR3 for alpha chain variable domain of TCR clone 395036 (TRAV26-2, TRAJ47)
CCVLLHHKSRRNKLVF

SEQ ID NO: 790072 - protein, 15 aa, Homo sapiens
  CDR3 for beta chain variable domain of TCR clone 395036 (TRBV7-9, TRBJ1-5)
CASSQGHQPNQPQHF

SEQ ID NO: 790073 - protein, 14 aa, Homo sapiens
  CDR3 for alpha chain variable domain of TCR clone 395037 (TRAV12-2, TRAJ17)
CAVLFKAAGNKLTL

SEQ ID NO: 790074 - protein, 14 aa, Homo sapiens
  CDR3 for beta chain variable domain of TCR clone 395037 (TRBV12-5, TRBJ2-5)
CASGSRTHKETQYF

SEQ ID NO: 790075 - protein, 19 aa, Homo sapiens
  CDR3 for alpha chain variable domain of TCR clone 395038 (TRAV9-2, TRAJ52)
CAMSFSLLSGGTSYGKLTF

SEQ ID NO: 790076 - protein, 14 aa, Homo sapiens
  CDR3 for beta chain variable domain of TCR clone 395038 (TRBV7-6, TRBJ2-7)
CASSLFQDSYEQYF

SEQ ID NO: 790077 - protein, 12 aa, Homo sapiens
  CDR3 for alpha chain variable domain of TCR clone 395039 (TRAV12-3, TRAJ54)
CGEDRGAQKLVF

SEQ ID NO: 790078 - protein, 15 aa, Homo sapiens
  CDR3 for beta chain variable domain of TCR clone 395039 (TRBV27, TRBJ2-1)
CASSLAGGPFNEQFF

SEQ ID NO: 790079 - protein, 15 aa, Homo sapiens
  CDR3 for alpha chain variable domain of TCR clone 395040 (TRAV21, TRAJ53)
CATLNSGGSNYKLTF

SEQ ID NO: 790080 - protein, 15 aa, Homo sapiens
  CDR3 for beta chain variable domain of TCR clone 395040 (TRBV7-2, TRBJ1-2)
CASSLVSGGDYGYTF

SEQ ID NO: 790081 - protein, 14 aa, Homo sapiens
  CDR3 for alpha chain variable domain of TCR clone 395041 (TRAV17, TRAJ4)
CATAPLVGYNKLIF

SEQ ID NO: 790082 - protein, 13 aa, Homo sapiens
  CDR3 for beta chain variable domain of TCR clone 395041 (TRBV12-4, TRBJ1-3)
CASSLASGNTIYF

SEQ ID NO: 790083 - protein, 15 aa, Homo sapiens
  CDR3 for alpha chain variable domain of TCR clone 395042 (TRAV2, TRAJ24)
CAVVRLKNSWGKLQF

SEQ ID NO: 790084 - protein, 16 aa, Homo sapiens
  CDR3 for beta chain variable domain of TCR clone 395042 (TRBV7-7, TRBJ2-3)
CASSPGTSGSTDKQYF

SEQ ID NO: 790085 - protein, 16 aa, Homo sapiens
  CDR3 for alpha chain variable domain of TCR clone 395043 (TRAV27, TRAJ13)
CAGAKTDSGGYQKVTF

SEQ ID NO: 790086 - protein, 15 aa, Homo sapiens
  CDR3 for beta chain variable domain of TCR clone 395043 (TRBV29-1, TRBJ2-1)
CSVGRHALFYNEQFF

SEQ ID NO: 790087 - protein, 13 aa, Homo sapiens
  CDR3 for alpha chain variable domain of TCR clone 395044 (TRAV3, TRAJ21)
CAVREPYFNKFYF

SEQ ID NO: 790088 - protein, 14 aa, Homo sapiens
  CDR3 for beta chain variable domain of TCR clone 395044 (TRBV12-5, TRBJ2-5)
CASGSRTHQETQYF

SEQ ID NO: 790089 - protein, 13 aa, Homo sapiens
  CDR3 for alpha chain variable domain of TCR clone 395045 (TRAV3, TRAJ21)
CAVREPDFNKFYF

SEQ ID NO: 790090 - protein, 12 aa, Homo sapiens
  CDR3 for beta chain variable domain of TCR clone 395045 (TRBV19, TRBJ1-5)
CASSIAQQPQHF

SEQ ID NO: 790091 - protein, 15 aa, Homo sapiens
  CDR3 for alpha chain variable domain of TCR clone 395046 (TRAV35, TRAJ50)
CAGQLRKTYYDKVIF

SEQ ID NO: 790092 - protein, 12 aa, Homo sapiens
  CDR3 for beta chain variable domain of TCR clone 395046 (TRBV5-1, TRBJ2-5)
CASSLGLETRYF

SEQ ID NO: 790093 - protein, 14 aa, Homo sapiens
  CDR3 for alpha chain variable domain of TCR clone 395047 (TRAV21, TRAJ45)
CAVHSGGGADGLNF

SEQ ID NO: 790094 - protein, 14 aa, Homo sapiens
  CDR3 for beta chain variable domain of TCR clone 395047 (TRBV20-1, TRBJ2-1)
CSARRLAEANEQFF

SEQ ID NO: 790095 - protein, 14 aa, Homo sapiens
  CDR3 for alpha chain variable domain of TCR clone 395048 (TRAV12-2, TRAJ6)
CASKWGGGSYIPTF

SEQ ID NO: 790096 - protein, 13 aa, Homo sapiens
  CDR3 for beta chain variable domain of TCR clone 395048 (TRBV12-4, TRBJ2-5)
CASSPGTEETQYF

SEQ ID NO: 790097 - protein, 11 aa, Homo sapiens
  CDR3 for alpha chain variable domain of TCR clone 395049 (TRAV8-4, TRAJ30)
CLLQRWQDHLW

SEQ ID NO: 790098 - protein, 16 aa, Homo sapiens
  CDR3 for beta chain variable domain of TCR clone 395049 (TRBV20-1, TRBJ1-5)
CSAELPGQQTNQPQHF

SEQ ID NO: 790099 - protein, 12 aa, Homo sapiens
  CDR3 for alpha chain variable domain of TCR clone 395050 (TRAV30, TRAJ43)
CGTEERGNDIRF

SEQ ID NO: 790100 - protein, 12 aa, Homo sapiens
  CDR3 for beta chain variable domain of TCR clone 395050 (TRBV27, TRBJ2-7)
CASFSQGYEQYF

SEQ ID NO: 790101 - protein, 15 aa, Homo sapiens
  CDR3 for alpha chain variable domain of TCR clone 395051 (TRAV21, TRAJ53)
CATLNSGGSNYKLTF

SEQ ID NO: 790102 - protein, 16 aa, Homo sapiens
  CDR3 for beta chain variable domain of TCR clone 395051 (TRBV24-1, TRBJ2-3)
CASSDPGTGATDTQYF

SEQ ID NO: 790103 - protein, 16 aa, Homo sapiens
  CDR3 for alpha chain variable domain of TCR clone 395052 (TRAV30, TRAJ24)
CGTEIVDADSWGKFQL

SEQ ID NO: 790104 - protein, 15 aa, Homo sapiens
  CDR3 for beta chain variable domain of TCR clone 395052 (TRBV19, TRBJ1-6)
CASSTQGAVGSPLHF

SEQ ID NO: 790105 - protein, 12 aa, Homo sapiens
  CDR3 for alpha chain variable domain of TCR clone 395053 (TRAV12-3, TRAJ17)
CAMTLTGNKLTF

SEQ ID NO: 790106 - protein, 18 aa, Homo sapiens
  CDR3 for beta chain variable domain of TCR clone 395053 (TRBV4-3, TRBJ1-2)
CASSQDGQSAPSDYGYTF

SEQ ID NO: 790107 - protein, 13 aa, Homo sapiens
  CDR3 for alpha chain variable domain of TCR clone 395054 (TRAV17, TRAJ9)
CATDYTGGFKTIF

SEQ ID NO: 790108 - protein, 16 aa, Homo sapiens
  CDR3 for beta chain variable domain of TCR clone 395054 (TRBV7-7, TRBJ2-1)
CASSLASGTPYYEQFF

SEQ ID NO: 790109 - protein, 18 aa, Homo sapiens
  CDR3 for alpha chain variable domain of TCR clone 395055 (TRAV29/DV5, TRAJ52)
CAAGFRGAGGTSYGQLTF

SEQ ID NO: 790110 - protein, 18 aa, Homo sapiens
  CDR3 for beta chain variable domain of TCR clone 395055 (TRBV7-3, TRBJ2-1)
CASSLTLASGRAMVSSSS

SEQ ID NO: 790111 - protein, 14 aa, Homo sapiens
  CDR3 for alpha chain variable domain of TCR clone 395056 (TRAV27, TRAJ36)
CAGPPKRGANNLLF

SEQ ID NO: 790112 - protein, 15 aa, Homo sapiens
  CDR3 for beta chain variable domain of TCR clone 395056 (TRBV18, TRBJ2-7)
CDSSPASTPNYEQYF

SEQ ID NO: 790113 - protein, 17 aa, Homo sapiens
  CDR3 for alpha chain variable domain of TCR clone 395057 (TRAV3, TRAJ6)
CAVRDGPRAGGSYIPTF

SEQ ID NO: 790114 - protein, 14 aa, Homo sapiens
  CDR3 for beta chain variable domain of TCR clone 395057 (TRBV7-9, TRBJ2-7)
CASSPKTSFYEQYF

SEQ ID NO: 790115 - protein, 12 aa, Homo sapiens
  CDR3 for alpha chain variable domain of TCR clone 395058 (TRAV12-2, TRAJ10)
WGVTGGGNKLTF

SEQ ID NO: 790116 - protein, 15 aa, Homo sapiens
  CDR3 for beta chain variable domain of TCR clone 395058 (TRBV5-1, TRBJ2-7)
CASSLNGGPAREQYF

SEQ ID NO: 790117 - protein, 14 aa, Homo sapiens
  CDR3 for alpha chain variable domain of TCR clone 395059 (TRAV12-2, TRAJ13)
CAVKKTGGYQKVTF

SEQ ID NO: 790118 - protein, 16 aa, Homo sapiens
  CDR3 for beta chain variable domain of TCR clone 395059 (TRBV4-1, TRBJ2-5)
CASSSGLAGVLGTQYF

SEQ ID NO: 790119 - protein, 16 aa, Homo sapiens
  CDR3 for alpha chain variable domain of TCR clone 395060 (TRAV1-2, TRAJ10)
CAVRGVLTGGGNKLTF

SEQ ID NO: 790120 - protein, 13 aa, Homo sapiens
  CDR3 for beta chain variable domain of TCR clone 395060 (TRBV10-3, TRBJ2-7)
CASKLAVNYGQYF

SEQ ID NO: 790121 - protein, 14 aa, Homo sapiens
  CDR3 for alpha chain variable domain of TCR clone 395061 (TRAV13-1, TRAJ24)
CAASKADSWGKLQF

SEQ ID NO: 790122 - protein, 13 aa, Homo sapiens
  CDR3 for beta chain variable domain of TCR clone 395061 (TRBV7-6, TRBJ1-2)
CASSLVADYGYTF

SEQ ID NO: 790123 - protein, 14 aa, Homo sapiens
  CDR3 for alpha chain variable domain of TCR clone 395062 (TRAV8-3, TRAJ10)
CAVGNAGGGNKPNF

SEQ ID NO: 790124 - protein, 17 aa, Homo sapiens
  CDR3 for beta chain variable domain of TCR clone 395062 (TRBV27, TRBJ2-7)
CASSAKRPGTGPYEQYF

SEQ ID NO: 790125 - protein, 13 aa, Homo sapiens
  CDR3 for alpha chain variable domain of TCR clone 395063 (TRAV8-3, TRAJ34)
CAVGGGNTDKLIF

SEQ ID NO: 790126 - protein, 16 aa, Homo sapiens
  CDR3 for beta chain variable domain of TCR clone 395063 (TRBV7-8, TRBJ1-4)
CASSLGVVTSNEKLFF

SEQ ID NO: 790127 - protein, 13 aa, Homo sapiens
  CDR3 for alpha chain variable domain of TCR clone 395064 (TRAV1-1, TRAJ34)
CAVEAPTSSSLGL

SEQ ID NO: 790128 - protein, 13 aa, Homo sapiens
  CDR3 for beta chain variable domain of TCR clone 395064 (TRBV7-7, TRBJ2-5)
CASSRSGQETQYF

SEQ ID NO: 790129 - protein, 15 aa, Homo sapiens
  CDR3 for alpha chain variable domain of TCR clone 395065 (TRAV13-1, TRAJ17)
CAANIERAAGNKLTF

SEQ ID NO: 790130 - protein, 17 aa, Homo sapiens
  CDR3 for beta chain variable domain of TCR clone 395065 (TRBV7-9, TRBJ2-1)
CASSLVASYPSYNEQFF

SEQ ID NO: 790131 - protein, 12 aa, Homo sapiens
  CDR3 for alpha chain variable domain of TCR clone 395066 (TRAV12-3, TRAJ17)
CAMTLTGNKLTC

SEQ ID NO: 790132 - protein, 15 aa, Homo sapiens
  CDR3 for beta chain variable domain of TCR clone 395066 (TRBV20-1, TRBJ2-7)
CRARDRVSGMDEQYF

SEQ ID NO: 790133 - protein, 14 aa, Homo sapiens
  CDR3 for alpha chain variable domain of TCR clone 395067 (TRAV1-2, TRAJ17)
CAVRDLTAGNKLTF

SEQ ID NO: 790134 - protein, 15 aa, Homo sapiens
  CDR3 for beta chain variable domain of TCR clone 395067 (TRBV20-1, TRBJ2-7)
CGARDRVSGMDEQYF

SEQ ID NO: 790135 - protein, 14 aa, Homo sapiens
  CDR3 for alpha chain variable domain of TCR clone 395068 (TRAV12-3, TRAJ9)
CAISPNTGGFKTIF

SEQ ID NO: 790136 - protein, 13 aa, Homo sapiens
  CDR3 for beta chain variable domain of TCR clone 395068 (TRBV4-2, TRBJ1-1)
CASSQAGNTEAFF

SEQ ID NO: 790137 - protein, 15 aa, Homo sapiens
  CDR3 for alpha chain variable domain of TCR clone 395069 (TRAV2, TRAJ9)
CAVEDRGTGGFKTIF

SEQ ID NO: 790138 - protein, 18 aa, Homo sapiens
  CDR3 for beta chain variable domain of TCR clone 395069 (TRBV24-1, TRBJ2-3)
SGWGWQTLGTGATDTQYF

SEQ ID NO: 790139 - protein, 13 aa, Homo sapiens
  CDR3 for alpha chain variable domain of TCR clone 395070 (TRAV16, TRAJ34)
CALSPYNTDKLIF

SEQ ID NO: 790140 - protein, 13 aa, Homo sapiens
  CDR3 for beta chain variable domain of TCR clone 395070 (TRBV11-3, TRBJ2-7)
CASSLDKLYEQYF

SEQ ID NO: 790141 - protein, 13 aa, Homo sapiens
  CDR3 for alpha chain variable domain of TCR clone 395071 (TRAV13-1, TRAJ6)
CAASSGGSYIPTF

SEQ ID NO: 790142 - protein, 14 aa, Homo sapiens
  CDR3 for beta chain variable domain of TCR clone 395071 (TRBV20-1, TRBJ2-4)
CSAVAGGPGNIQYF

SEQ ID NO: 790143 - protein, 13 aa, Homo sapiens
  CDR3 for alpha chain variable domain of TCR clone 395072 (TRAV9-2, TRAJ5)
CALSYTGRRALTF

SEQ ID NO: 790144 - protein, 12 aa, Homo sapiens
  CDR3 for beta chain variable domain of TCR clone 395072 (TRBV28, TRBJ1-2)
CASSLTRESYTF

SEQ ID NO: 790145 - protein, 12 aa, Homo sapiens
  CDR3 for alpha chain variable domain of TCR clone 395073 (TRAV3, TRAJ43)
FAVRDPNNDMRF

SEQ ID NO: 790146 - protein, 15 aa, Homo sapiens
  CDR3 for beta chain variable domain of TCR clone 395073 (TRBV6-5, TRBJ2-1)
CASSYDAGAGNEQFF

SEQ ID NO: 790147 - protein, 15 aa, Homo sapiens
  CDR3 for alpha chain variable domain of TCR clone 395074 (TRAV21, TRAJ53)
CATLNSGGGNSKLTF

SEQ ID NO: 790148 - protein, 13 aa, Homo sapiens
  CDR3 for beta chain variable domain of TCR clone 395074 (TRBV7-3, TRBJ1-1)
CASSQDWGAEAFF

SEQ ID NO: 790149 - protein, 15 aa, Homo sapiens
  CDR3 for alpha chain variable domain of TCR clone 395075 (TRAV26-1, TRAJ29)
CIVRVEGSGNTPLVF

SEQ ID NO: 790150 - protein, 15 aa, Homo sapiens
  CDR3 for beta chain variable domain of TCR clone 395075 (TRBV6-3, TRBJ2-1)
CASSAGLEGNNEQFF

SEQ ID NO: 790151 - protein, 15 aa, Homo sapiens
  CDR3 for alpha chain variable domain of TCR clone 395076 (TRAV3, TRAJ5)
CAVRDLDTGRRALNF

SEQ ID NO: 790152 - protein, 13 aa, Homo sapiens
  CDR3 for beta chain variable domain of TCR clone 395076 (TRBV12-4, TRBJ2-7)
CARSPTETYEQYF

SEQ ID NO: 790153 - protein, 14 aa, Homo sapiens
  CDR3 for alpha chain variable domain of TCR clone 395077 (TRAV1-2, TRAJ10)
CAVRVTGGGNKLTF

SEQ ID NO: 790154 - protein, 12 aa, Homo sapiens
  CDR3 for beta chain variable domain of TCR clone 395077 (TRBV11-2, TRBJ2-1)
CASSPGNNEQFF

SEQ ID NO: 790155 - protein, 17 aa, Homo sapiens
  CDR3 for alpha chain variable domain of TCR clone 395078 (TRAV3, TRAJ12)
CAVRDGGRMDSSYKLIF

SEQ ID NO: 790156 - protein, 11 aa, Homo sapiens
  CDR3 for beta chain variable domain of TCR clone 395078 (TRBV7-2, TRBJ2-7)
CASSSGLWQYF

SEQ ID NO: 790157 - protein, 16 aa, Homo sapiens
  CDR3 for alpha chain variable domain of TCR clone 395079 (TRAV30, TRAJ24)
CGTEIVDADSWGRFQF

SEQ ID NO: 790158 - protein, 14 aa, Homo sapiens
  CDR3 for beta chain variable domain of TCR clone 395079 (TRBV12-5, TRBJ2-5)
CASGPRTHQETQYF

SEQ ID NO: 790159 - protein, 12 aa, Homo sapiens
  CDR3 for alpha chain variable domain of TCR clone 395080 (TRAV13-2, TRAJ58)
CAQRRLDSRLTF

SEQ ID NO: 790160 - protein, 15 aa, Homo sapiens
  CDR3 for beta chain variable domain of TCR clone 395080 (TRBV5-1, TRBJ2-5)
CASSSGREMVETQYF

SEQ ID NO: 790161 - protein, 12 aa, Homo sapiens
  CDR3 for alpha chain variable domain of TCR clone 395081 (TRAV12-3, TRAJ17)
CAMTLTANKLTF

SEQ ID NO: 790162 - protein, 15 aa, Homo sapiens
  CDR3 for beta chain variable domain of TCR clone 395081 (TRBV7-9, TRBJ1-6)
CASSSPGRGNSPLHF

SEQ ID NO: 790163 - protein, 15 aa, Homo sapiens
  CDR3 for alpha chain variable domain of TCR clone 395082 (TRAV3, TRAJ5)
CAVRDRKTGRRALTF

SEQ ID NO: 790164 - protein, 15 aa, Homo sapiens
  CDR3 for beta chain variable domain of TCR clone 395082 (TRBV7-9, TRBJ2-2)
CASGPVDTFPGELFF

SEQ ID NO: 790165 - protein, 18 aa, Homo sapiens
  CDR3 for alpha chain variable domain of TCR clone 395083 (TRAV12-3, TRAJ52)
CAMSVGGAGGTSYGKLTF

SEQ ID NO: 790166 - protein, 17 aa, Homo sapiens
  CDR3 for beta chain variable domain of TCR clone 395083 (TRBV13, TRBJ2-3)
CASSLARVAGGRNTQYF

SEQ ID NO: 790167 - protein, 13 aa, Homo sapiens
  CDR3 for alpha chain variable domain of TCR clone 395084 (TRAV16, TRAJ28)
FAPTGAGGYQLTF

SEQ ID NO: 790168 - protein, 16 aa, Homo sapiens
  CDR3 for beta chain variable domain of TCR clone 395084 (TRBV28, TRBJ1-5)
CASSLTGQGWDQPQHF

SEQ ID NO: 790169 - protein, 13 aa, Homo sapiens
  CDR3 for alpha chain variable domain of TCR clone 395085 (TRAV12-3, TRAJ49)
CATAVTPNTGNQF

SEQ ID NO: 790170 - protein, 18 aa, Homo sapiens
  CDR3 for beta chain variable domain of TCR clone 395085 (TRBV4-1, TRBJ1-5)
CASSQDPRGQGLNQPQHF

SEQ ID NO: 790171 - protein, 14 aa, Homo sapiens
  CDR3 for alpha chain variable domain of TCR clone 395086 (TRAV9-2, TRAJ39)
CALYIYNAGNMLTF

SEQ ID NO: 790172 - protein, 12 aa, Homo sapiens
  CDR3 for beta chain variable domain of TCR clone 395086 (TRBV2, TRBJ2-1)
CASSERFREQFF

SEQ ID NO: 790173 - protein, 13 aa, Homo sapiens
  CDR3 for alpha chain variable domain of TCR clone 395087 (TRAV3, TRAJ27)
CAVRPLGAGKSTF

SEQ ID NO: 790174 - protein, 13 aa, Homo sapiens
  CDR3 for beta chain variable domain of TCR clone 395087 (TRBV27, TRBJ2-1)
CASRTLGVGEQFF

SEQ ID NO: 790175 - protein, 15 aa, Homo sapiens
  CDR3 for alpha chain variable domain of TCR clone 395088 (TRAV17, TRAJ57)
CATGPSQGGSEMLVF

SEQ ID NO: 790176 - protein, 15 aa, Homo sapiens
  CDR3 for beta chain variable domain of TCR clone 395088 (TRBV25-1, TRBJ1-4)
CASSPGDSTNEKLFF

SEQ ID NO: 790177 - protein, 14 aa, Homo sapiens
  CDR3 for alpha chain variable domain of TCR clone 395089 (TRAV1-2, TRAJ8)
CAVREDTGFQKLVF

SEQ ID NO: 790178 - protein, 12 aa, Homo sapiens
  CDR3 for beta chain variable domain of TCR clone 395089 (TRBV3-1, TRBJ2-5)
CASSQRGETQYF

SEQ ID NO: 790179 - protein, 13 aa, Homo sapiens
  CDR3 for alpha chain variable domain of TCR clone 395090 (TRAV13-1, TRAJ9)
CAASGTGGFKTIF

SEQ ID NO: 790180 - protein, 13 aa, Homo sapiens
  CDR3 for beta chain variable domain of TCR clone 395090 (TRBV12-4, TRBJ2-7)
CASSSERVREQYF

SEQ ID NO: 790181 - protein, 11 aa, Homo sapiens
  CDR3 for alpha chain variable domain of TCR clone 395091 (TRAV13-2, TRAJ20)
CADANDYKLSF

SEQ ID NO: 790182 - protein, 12 aa, Homo sapiens
  CDR3 for beta chain variable domain of TCR clone 395091 (TRBV5-1, TRBJ2-3)
CASSLAADTQYF

SEQ ID NO: 790183 - protein, 15 aa, Homo sapiens
  CDR3 for alpha chain variable domain of TCR clone 395092 (TRAV21, TRAJ53)
CATLNSGGSNYKLTF

SEQ ID NO: 790184 - protein, 14 aa, Homo sapiens
  CDR3 for beta chain variable domain of TCR clone 395092 (TRBV11-2, TRBJ1-2)
CASSLGTANYGYTF

SEQ ID NO: 790185 - protein, 12 aa, Homo sapiens
  CDR3 for alpha chain variable domain of TCR clone 395093 (TRAV23/DV6, TRAJ58)
CAARLLRGETSD

SEQ ID NO: 790186 - protein, 15 aa, Homo sapiens
  CDR3 for beta chain variable domain of TCR clone 395093 (TRBV9, TRBJ1-6)
CASSVAGTGDSPLHF

SEQ ID NO: 790187 - protein, 18 aa, Homo sapiens
  CDR3 for alpha chain variable domain of TCR clone 395094 (TRAV26-2, TRAJ54)
CILRDVEVGIQGAQKLVF

SEQ ID NO: 790188 - protein, 14 aa, Homo sapiens
  CDR3 for beta chain variable domain of TCR clone 395094 (TRBV7-7, TRBJ2-2)
CATRQDSDTGELFF

SEQ ID NO: 790189 - protein, 18 aa, Homo sapiens
  CDR3 for alpha chain variable domain of TCR clone 395095 (TRAV9-2, TRAJ52)
CALSRHNAGGTSYGKLTV

SEQ ID NO: 790190 - protein, 13 aa, Homo sapiens
  CDR3 for beta chain variable domain of TCR clone 395095 (TRBV7-9, TRBJ1-2)
CASSLKQNYGYTF

SEQ ID NO: 790191 - protein, 11 aa, Homo sapiens
  CDR3 for alpha chain variable domain of TCR clone 395096 (TRAV17, TRAJ43)
CATPRSNDMRF

SEQ ID NO: 790192 - protein, 14 aa, Homo sapiens
  CDR3 for beta chain variable domain of TCR clone 395096 (TRBV7-2, TRBJ2-7)
CASSPKISFYEQYF

SEQ ID NO: 790193 - protein, 17 aa, Homo sapiens
  CDR3 for alpha chain variable domain of TCR clone 395097 (TRAV3, TRAJ6)
CAVSRRTDTGGSYIPTF

SEQ ID NO: 790194 - protein, 18 aa, Homo sapiens
  CDR3 for beta chain variable domain of TCR clone 395097 (TRBV7-2, TRBJ2-3)
CASSLETSRGRKADTRYF

SEQ ID NO: 790195 - protein, 16 aa, Homo sapiens
  CDR3 for alpha chain variable domain of TCR clone 395098 (TRAV30, TRAJ24)
CGTEIVDADSWGKFQF

SEQ ID NO: 790196 - protein, 13 aa, Homo sapiens
  CDR3 for beta chain variable domain of TCR clone 395098 (TRBV7-2, TRBJ1-4)
RASSLAGLEKLFF

SEQ ID NO: 790197 - protein, 15 aa, Homo sapiens
  CDR3 for alpha chain variable domain of TCR clone 395099 (TRAV35, TRAJ20)
CAGQLVGSNEYKLSF

SEQ ID NO: 790198 - protein, 13 aa, Homo sapiens
  CDR3 for beta chain variable domain of TCR clone 395099 (TRBV19, TRBJ2-7)
CASSKTGTHEQYF

SEQ ID NO: 790199 - protein, 12 aa, Homo sapiens
  CDR3 for alpha chain variable domain of TCR clone 395100 (TRAV17, TRAJ4)
CATDGGYKKLIF

SEQ ID NO: 790200 - protein, 13 aa, Homo sapiens
  CDR3 for beta chain variable domain of TCR clone 395100 (TRBV2, TRBJ1-1)
CASSVLMNTEAFF

SEQ ID NO: 790201 - protein, 16 aa, Homo sapiens
  CDR3 for alpha chain variable domain of TCR clone 395101 (TRAV16, TRAJ4)
CITVLPFSGGYNTLIF

SEQ ID NO: 790202 - protein, 14 aa, Homo sapiens
  CDR3 for beta chain variable domain of TCR clone 395101 (TRBV19, TRBJ2-7)
CASSMGQGAIEQYF

SEQ ID NO: 790203 - protein, 15 aa, Homo sapiens
  CDR3 for alpha chain variable domain of TCR clone 395102 (TRAV12-1, TRAJ44)
CVADLPTGTASKLTF

SEQ ID NO: 790204 - protein, 15 aa, Homo sapiens
  CDR3 for beta chain variable domain of TCR clone 395102 (TRBV24-1, TRBJ2-1)
CATRAAQGGYNEQFF

SEQ ID NO: 790205 - protein, 16 aa, Homo sapiens
  CDR3 for alpha chain variable domain of TCR clone 395103 (TRAV17, TRAJ35)
CATAEGGIGFGNVLHC

SEQ ID NO: 790206 - protein, 16 aa, Homo sapiens
  CDR3 for beta chain variable domain of TCR clone 395103 (TRBV6-5, TRBJ2-7)
CARSSDPTSGFYEQYF

SEQ ID NO: 790207 - protein, 16 aa, Homo sapiens
  CDR3 for alpha chain variable domain of TCR clone 395104 (TRAV12-3, TRAJ53)
CAMSPGSGGSNYKLTF

SEQ ID NO: 790208 - protein, 15 aa, Homo sapiens
  CDR3 for beta chain variable domain of TCR clone 395104 (TRBV6-5, TRBJ2-7)
CASSRTSGFSYEQYF

SEQ ID NO: 790209 - protein, 12 aa, Homo sapiens
  CDR3 for alpha chain variable domain of TCR clone 395105 (TRAV24, TRAJ41)
CAPYDSGYALNF

SEQ ID NO: 790210 - protein, 14 aa, Homo sapiens
  CDR3 for beta chain variable domain of TCR clone 395105 (TRBV20-1, TRBJ1-1)
CSAQTRIGGTEAFF

SEQ ID NO: 790211 - protein, 13 aa, Homo sapiens
  CDR3 for alpha chain variable domain of TCR clone 395106 (TRAV27, TRAJ17)
CAGAATAGNKLTF

SEQ ID NO: 790212 - protein, 15 aa, Homo sapiens
  CDR3 for beta chain variable domain of TCR clone 395106 (TRBV5-1, TRBJ2-3)
CASRNQAGSTDTHYF

SEQ ID NO: 790213 - protein, 13 aa, Homo sapiens
  CDR3 for alpha chain variable domain of TCR clone 395107 (TRAV21, TRAJ36)
CAVIKTGANNLFF

SEQ ID NO: 790214 - protein, 13 aa, Homo sapiens
  CDR3 for beta chain variable domain of TCR clone 395107 (TRBV29-1, TRBJ2-3)
GSATRGGRDTQYF

SEQ ID NO: 790215 - protein, 15 aa, Homo sapiens
  CDR3 for alpha chain variable domain of TCR clone 395108 (TRAV21, TRAJ45)
CAVSYSGGGADGLTV

SEQ ID NO: 790216 - protein, 13 aa, Homo sapiens
  CDR3 for beta chain variable domain of TCR clone 395108 (TRBV20-1, TRBJ2-5)
CSAATELQETQYF

SEQ ID NO: 790217 - protein, 14 aa, Homo sapiens
  CDR3 for alpha chain variable domain of TCR clone 395109 (TRAV8-4, TRAJ38)
CARLNAGNNRKLIW

SEQ ID NO: 790218 - protein, 18 aa, Homo sapiens
  CDR3 for beta chain variable domain of TCR clone 395109 (TRBV4-2, TRBJ2-7)
CASSPGLAGRSLPYEQYF

SEQ ID NO: 790219 - protein, 15 aa, Homo sapiens
  CDR3 for alpha chain variable domain of TCR clone 395110 (TRAV13-2, TRAJ35)
CSESPNIGFGNVLHC

SEQ ID NO: 790220 - protein, 13 aa, Homo sapiens
  CDR3 for beta chain variable domain of TCR clone 395110 (TRBV10-2, TRBJ2-5)
CASSTLARETQYF

SEQ ID NO: 790221 - protein, 14 aa, Homo sapiens
  CDR3 for alpha chain variable domain of TCR clone 395111 (TRAV30, TRAJ26)
CGTEIVSYGQNFFF

SEQ ID NO: 790222 - protein, 13 aa, Homo sapiens
  CDR3 for beta chain variable domain of TCR clone 395111 (TRBV18, TRBJ1-1)
CQLTRQGNTEAFF

SEQ ID NO: 790223 - protein, 14 aa, Homo sapiens
  CDR3 for alpha chain variable domain of TCR clone 395112 (TRAV38-1, TRAJ45)
CASHSGGGADGLTF

SEQ ID NO: 790224 - protein, 14 aa, Homo sapiens
  CDR3 for beta chain variable domain of TCR clone 395112 (TRBV7-9, TRBJ2-7)
CASSLSSGLNEQYF

SEQ ID NO: 790225 - protein, 12 aa, Homo sapiens
  CDR3 for alpha chain variable domain of TCR clone 395113 (TRAV13-2, TRAJ8)
CAPWLGFQKLVF

SEQ ID NO: 790226 - protein, 14 aa, Homo sapiens
  CDR3 for beta chain variable domain of TCR clone 395113 (TRBV18, TRBJ1-5)
CASSRQQRNQPQHS

SEQ ID NO: 790227 - protein, 14 aa, Homo sapiens
  CDR3 for alpha chain variable domain of TCR clone 395114 (TRAV23/DV6, TRAJ4)
CSANLSGGYNKLIF

SEQ ID NO: 790228 - protein, 15 aa, Homo sapiens
  CDR3 for beta chain variable domain of TCR clone 395114 (TRBV20-1, TRBJ1-1)
CSASRGVTGNTEAFF

SEQ ID NO: 790229 - protein, 12 aa, Homo sapiens
  CDR3 for alpha chain variable domain of TCR clone 395115 (TRAV17, TRAJ4)
CATDCCYNNLIF

SEQ ID NO: 790230 - protein, 13 aa, Homo sapiens
  CDR3 for beta chain variable domain of TCR clone 395115 (TRBV29-1, TRBJ2-2)
CSTTGVNTGELFF

SEQ ID NO: 790231 - protein, 11 aa, Homo sapiens
  CDR3 for alpha chain variable domain of TCR clone 395116 (TRAV13-1, TRAJ5)
CAPKGRRALTF

SEQ ID NO: 790232 - protein, 13 aa, Homo sapiens
  CDR3 for beta chain variable domain of TCR clone 395116 (TRBV10-2, TRBJ2-7)
CASGASGGYEQYF

SEQ ID NO: 790233 - protein, 12 aa, Homo sapiens
  CDR3 for alpha chain variable domain of TCR clone 395117 (TRAV22, TRAJ22)
CAPGGAARQLTF

SEQ ID NO: 790234 - protein, 13 aa, Homo sapiens
  CDR3 for beta chain variable domain of TCR clone 395117 (TRBV15, TRBJ1-6)
CATSGGLNSPLHF

SEQ ID NO: 790235 - protein, 14 aa, Homo sapiens
  CDR3 for alpha chain variable domain of TCR clone 395118 (TRAV12-3, TRAJ10)
SHLPLTGGGNKLTF

SEQ ID NO: 790236 - protein, 13 aa, Homo sapiens
  CDR3 for beta chain variable domain of TCR clone 395118 (TRBV11-2, TRBJ2-7)
CASSLGDSYEQYF

SEQ ID NO: 790237 - protein, 13 aa, Homo sapiens
  CDR3 for alpha chain variable domain of TCR clone 395119 (TRAV13-1, TRAJ21)
CAASIYHFNKFYF

SEQ ID NO: 790238 - protein, 13 aa, Homo sapiens
  CDR3 for beta chain variable domain of TCR clone 395119 (TRBV27, TRBJ1-4)
CASSLMGDEKLFF

SEQ ID NO: 790239 - protein, 13 aa, Homo sapiens
  CDR3 for alpha chain variable domain of TCR clone 395120 (TRAV12-1, TRAJ22)
CVVPSGSARQLTF

SEQ ID NO: 790240 - protein, 15 aa, Homo sapiens
  CDR3 for beta chain variable domain of TCR clone 395120 (TRBV10-2, TRBJ2-6)
CASSEQGTGANVLTF

SEQ ID NO: 790241 - protein, 15 aa, Homo sapiens
  CDR3 for alpha chain variable domain of TCR clone 395121 (TRAV25, TRAJ53)
CPTSNSGGSNYKLTF

SEQ ID NO: 790242 - protein, 11 aa, Homo sapiens
  CDR3 for beta chain variable domain of TCR clone 395121 (TRBV11-2, TRBJ2-2)
CASSLPGELFF

SEQ ID NO: 790243 - protein, 14 aa, Homo sapiens
  CDR3 for alpha chain variable domain of TCR clone 395122 (TRAV8-6, TRAJ30)
CAVSEQNRDDKNIF

SEQ ID NO: 790244 - protein, 13 aa, Homo sapiens
  CDR3 for beta chain variable domain of TCR clone 395122 (TRBV7-3, TRBJ1-1)
CASSQDWGAEAFF

SEQ ID NO: 790245 - protein, 12 aa, Homo sapiens
  CDR3 for alpha chain variable domain of TCR clone 395123 (TRAV8-6, TRAJ43)
CAVSHNNDAMRF

SEQ ID NO: 790246 - protein, 14 aa, Homo sapiens
  CDR3 for beta chain variable domain of TCR clone 395123 (TRBV10-3, TRBJ1-1)
CAISDGSGVTEAFF

SEQ ID NO: 790247 - protein, 13 aa, Homo sapiens
  CDR3 for alpha chain variable domain of TCR clone 395124 (TRAV12-3, TRAJ33)
CAMSVNSNYQLIW

SEQ ID NO: 790248 - protein, 14 aa, Homo sapiens
  CDR3 for beta chain variable domain of TCR clone 395124 (TRBV20-1, TRBJ2-5)
CSATGLAVQETQYF

SEQ ID NO: 790249 - protein, 15 aa, Homo sapiens
  CDR3 for alpha chain variable domain of TCR clone 395125 (TRAV26-1, TRAJ29)
CIVRVEGSGNTPLVF

SEQ ID NO: 790250 - protein, 22 aa, Homo sapiens
  CDR3 for beta chain variable domain of TCR clone 395125 (TRBV11-2, TRBJ1-4)
CASSLDITRRGIPRKDNEKLFF

SEQ ID NO: 790251 - protein, 14 aa, Homo sapiens
  CDR3 for alpha chain variable domain of TCR clone 395126 (TRAV17, TRAJ29)
CATDGGFRKHTSCL

SEQ ID NO: 790252 - protein, 10 aa, Homo sapiens
  CDR3 for beta chain variable domain of TCR clone 395126 (TRBV2, TRBJ2-5)
CASSAATQYF

SEQ ID NO: 790253 - protein, 15 aa, Homo sapiens
  CDR3 for alpha chain variable domain of TCR clone 395127 (TRAV17, TRAJ57)
CATGPSQGGSEKLVF

SEQ ID NO: 790254 - protein, 15 aa, Homo sapiens
  CDR3 for beta chain variable domain of TCR clone 395127 (TRBV12-4, TRBJ1-5)
CASSRPVGSNQPQHF

SEQ ID NO: 790255 - protein, 13 aa, Homo sapiens
  CDR3 for alpha chain variable domain of TCR clone 395128 (TRAV8-6, TRAJ49)
CAVITNTGNQFYF

SEQ ID NO: 790256 - protein, 16 aa, Homo sapiens
  CDR3 for beta chain variable domain of TCR clone 395128 (TRBV12-4, TRBJ2-7)
CASSLIGGTGTYEQYF

SEQ ID NO: 790257 - protein, 14 aa, Homo sapiens
  CDR3 for alpha chain variable domain of TCR clone 395129 (TRAV13-1, TRAJ44)
CAAKATGTASKLTF

SEQ ID NO: 790258 - protein, 18 aa, Homo sapiens
  CDR3 for beta chain variable domain of TCR clone 395129 (TRBV24-1, TRBJ2-3)
CATSDLPRLAGGADTQYF

SEQ ID NO: 790259 - protein, 14 aa, Homo sapiens
  CDR3 for alpha chain variable domain of TCR clone 395130 (TRAV17, TRAJ37)
CATDGSSNTGKLIF

SEQ ID NO: 790260 - protein, 14 aa, Homo sapiens
  CDR3 for beta chain variable domain of TCR clone 395130 (TRBV11-2, TRBJ2-7)
CASSRSGGAGEQYF

SEQ ID NO: 790261 - protein, 14 aa, Homo sapiens
  CDR3 for alpha chain variable domain of TCR clone 395131 (TRAV17, TRAJ34)
CATDSLEGTDKLIF

SEQ ID NO: 790262 - protein, 13 aa, Homo sapiens
  CDR3 for beta chain variable domain of TCR clone 395131 (TRBV7-9, TRBJ1-2)
CASSLKQNYGYTF

SEQ ID NO: 790263 - protein, 13 aa, Homo sapiens
  CDR3 for alpha chain variable domain of TCR clone 395132 (TRAV20, TRAJ3)
CASRYSSASKIIF

SEQ ID NO: 790264 - protein, 16 aa, Homo sapiens
  CDR3 for beta chain variable domain of TCR clone 395132 (TRBV6-1, TRBJ1-6)
CASSSDGTPRNSPLHF

SEQ ID NO: 790265 - protein, 16 aa, Homo sapiens
  CDR3 for alpha chain variable domain of TCR clone 395133 (TRAV3, TRAJ37)
CAVRPHGSGNTGKLIF

SEQ ID NO: 790266 - protein, 15 aa, Homo sapiens
  CDR3 for beta chain variable domain of TCR clone 395133 (TRBV2, TRBJ2-1)
CASSEEREGDNEQFF

SEQ ID NO: 790267 - protein, 13 aa, Homo sapiens
  CDR3 for alpha chain variable domain of TCR clone 395134 (TRAV8-3, TRAJ6)
CAVETRRKLHTYI

SEQ ID NO: 790268 - protein, 12 aa, Homo sapiens
  CDR3 for beta chain variable domain of TCR clone 395134 (TRBV27, TRBJ2-2)
CASKLFTGELFF

SEQ ID NO: 790269 - protein, 12 aa, Homo sapiens
  CDR3 for alpha chain variable domain of TCR clone 395135 (TRAV12-3, TRAJ40)
CNERLRNLQYIF

SEQ ID NO: 790270 - protein, 13 aa, Homo sapiens
  CDR3 for beta chain variable domain of TCR clone 395135 (TRBV7-9, TRBJ1-2)
CASSLKQNYGYTF

SEQ ID NO: 790271 - protein, 10 aa, Homo sapiens
  CDR3 for alpha chain variable domain of TCR clone 395136 (TRAV21, TRAJ31)
CAVDNARLMF

SEQ ID NO: 790272 - protein, 16 aa, Homo sapiens
  CDR3 for beta chain variable domain of TCR clone 395136 (TRBV4-2, TRBJ1-5)
CASSQGQGASNQPQHF

SEQ ID NO: 790273 - protein, 15 aa, Homo sapiens
  CDR3 for alpha chain variable domain of TCR clone 395137 (TRAV8-2, TRAJ40)
CVVLGTTSGTYKYIF

SEQ ID NO: 790274 - protein, 15 aa, Homo sapiens
  CDR3 for beta chain variable domain of TCR clone 395137 (TRBV11-2, TRBJ2-2)
CASSSDRVNAGELFF

SEQ ID NO: 790275 - protein, 15 aa, Homo sapiens
  CDR3 for alpha chain variable domain of TCR clone 395138 (TRAV3, TRAJ5)
CAVRDLDTGRRALTF

SEQ ID NO: 790276 - protein, 13 aa, Homo sapiens
  CDR3 for beta chain variable domain of TCR clone 395138 (TRBV20-1, TRBJ2-5)
CSARDSTQATQYF

SEQ ID NO: 790277 - protein, 16 aa, Homo sapiens
  CDR3 for alpha chain variable domain of TCR clone 395139 (TRAV16, TRAJ4)
CALSRMFSGGYNKLIF

SEQ ID NO: 790278 - protein, 13 aa, Homo sapiens
  CDR3 for beta chain variable domain of TCR clone 395139 (TRBV7-2, TRBJ2-4)
CASSREHANIQYF

SEQ ID NO: 790279 - protein, 12 aa, Homo sapiens
  CDR3 for alpha chain variable domain of TCR clone 395140 (TRAV1-2, TRAJ26)
CAVRYYGQNFVF

SEQ ID NO: 790280 - protein, 15 aa, Homo sapiens
  CDR3 for beta chain variable domain of TCR clone 395140 (TRBV20-1, TRBJ2-7)
CSARDRVSGMDEQYF

SEQ ID NO: 790281 - protein, 10 aa, Homo sapiens
  CDR3 for alpha chain variable domain of TCR clone 395141 (TRAV26-1, TRAJ22)
CIVSLNFFWF

SEQ ID NO: 790282 - protein, 15 aa, Homo sapiens
  CDR3 for beta chain variable domain of TCR clone 395141 (TRBV4-2, TRBJ1-2)
CGSSQRTGGRDGYTF

SEQ ID NO: 790283 - protein, 13 aa, Homo sapiens
  CDR3 for alpha chain variable domain of TCR clone 395142 (TRAV1-2, TRAJ9)
CAALNIGGFKTIF

SEQ ID NO: 790284 - protein, 15 aa, Homo sapiens
  CDR3 for beta chain variable domain of TCR clone 395142 (TRBV24-1, TRBJ2-1)
CATSGSGGFYNEQFF

SEQ ID NO: 790285 - protein, 14 aa, Homo sapiens
  CDR3 for alpha chain variable domain of TCR clone 395143 (TRAV12-3, TRAJ10)
SHLPLTGGGNKLTF

SEQ ID NO: 790286 - protein, 15 aa, Homo sapiens
  CDR3 for beta chain variable domain of TCR clone 395143 (TRBV28, TRBJ2-7)
CASGPGGRGFYEQYF

SEQ ID NO: 790287 - protein, 14 aa, Homo sapiens
  CDR3 for alpha chain variable domain of TCR clone 395144 (TRAV12-3, TRAJ10)
RHLPLTGGGNKLTF

SEQ ID NO: 790288 - protein, 13 aa, Homo sapiens
  CDR3 for beta chain variable domain of TCR clone 395144 (TRBV9, TRBJ2-1)
RASSPSGGNEQFF

SEQ ID NO: 790289 - protein, 14 aa, Homo sapiens
  CDR3 for alpha chain variable domain of TCR clone 395145 (TRAV1-2, TRAJ17)
CALRRGAAGNKLTF

SEQ ID NO: 790290 - protein, 13 aa, Homo sapiens
  CDR3 for beta chain variable domain of TCR clone 395145 (TRBV7-3, TRBJ1-1)
CASSQDWGAEAFF

SEQ ID NO: 790291 - protein, 11 aa, Homo sapiens
  CDR3 for alpha chain variable domain of TCR clone 395146 (TRAV35, TRAJ34)
CWARNTDKLIF

SEQ ID NO: 790292 - protein, 14 aa, Homo sapiens
  CDR3 for beta chain variable domain of TCR clone 395146 (TRBV5-1, TRBJ2-7)
CASGRGESLYEQYF

SEQ ID NO: 790293 - protein, 16 aa, Homo sapiens
  CDR3 for alpha chain variable domain of TCR clone 395147 (TRAV12-3, TRAJ53)
CAMSPGSGGSNHKLTF

SEQ ID NO: 790294 - protein, 11 aa, Homo sapiens
  CDR3 for beta chain variable domain of TCR clone 395147 (TRBV29-1, TRBJ2-5)
CSEDRTRTQYF

SEQ ID NO: 790295 - protein, 14 aa, Homo sapiens
  CDR3 for alpha chain variable domain of TCR clone 395148 (TRAV3, TRAJ16)
CCERLKSDGQKLLF

SEQ ID NO: 790296 - protein, 15 aa, Homo sapiens
  CDR3 for beta chain variable domain of TCR clone 395148 (TRBV28, TRBJ2-7)
CASSPGGMGFYEQYF

SEQ ID NO: 790297 - protein, 19 aa, Homo sapiens
  CDR3 for alpha chain variable domain of TCR clone 395149 (TRAV26-1, TRAJ50)
CCVLLHRQNPKTSYDKVIF

SEQ ID NO: 790298 - protein, 16 aa, Homo sapiens
  CDR3 for beta chain variable domain of TCR clone 395149 (TRBV24-1, TRBJ2-3)
CATSDPGTGATDTQYF

SEQ ID NO: 790299 - protein, 12 aa, Homo sapiens
  CDR3 for alpha chain variable domain of TCR clone 395150 (TRAV21, TRAJ31)
CAVSPARGRLMF

SEQ ID NO: 790300 - protein, 14 aa, Homo sapiens
  CDR3 for beta chain variable domain of TCR clone 395150 (TRBV28, TRBJ2-7)
CASSVLRISYEQYC

SEQ ID NO: 790301 - protein, 14 aa, Homo sapiens
  CDR3 for alpha chain variable domain of TCR clone 395151 (TRAV26-1, TRAJ17)
CIVRSSVSGSKLTF

SEQ ID NO: 790302 - protein, 15 aa, Homo sapiens
  CDR3 for beta chain variable domain of TCR clone 395151 (TRBV20-1, TRBJ1-1)
CSAFYAGTENTEAFF

SEQ ID NO: 790303 - protein, 13 aa, Homo sapiens
  CDR3 for alpha chain variable domain of TCR clone 395152 (TRAV1-2, TRAJ9)
CAVLNTGGFKTIF

SEQ ID NO: 790304 - protein, 10 aa, Homo sapiens
  CDR3 for beta chain variable domain of TCR clone 395152 (TRBV20-1, TRBJ2-3)
EATSTDTQYF

SEQ ID NO: 790305 - protein, 15 aa, Homo sapiens
  CDR3 for alpha chain variable domain of TCR clone 395153 (TRAV26-1, TRAJ23)
CIVRVAGYQGGKLIF

SEQ ID NO: 790306 - protein, 18 aa, Homo sapiens
  CDR3 for beta chain variable domain of TCR clone 395153 (TRBV28, TRBJ2-1)
CASSYTSGRANSYNEQFF

SEQ ID NO: 790307 - protein, 13 aa, Homo sapiens
  CDR3 for alpha chain variable domain of TCR clone 395154 (TRAV23/DV6, TRAJ22)
CAPYSGSARQLTF

SEQ ID NO: 790308 - protein, 15 aa, Homo sapiens
  CDR3 for beta chain variable domain of TCR clone 395154 (TRBV11-2, TRBJ1-6)
CASSLDPWAVSPLNF

SEQ ID NO: 790309 - protein, 10 aa, Homo sapiens
  CDR3 for alpha chain variable domain of TCR clone 395155 (TRAV3, TRAJ12)
CAVRDEMVRW

SEQ ID NO: 790310 - protein, 15 aa, Homo sapiens
  CDR3 for beta chain variable domain of TCR clone 395155 (TRBV5-5, TRBJ1-5)
CASSLKGGGEQHQHF

SEQ ID NO: 790311 - protein, 13 aa, Homo sapiens
  CDR3 for alpha chain variable domain of TCR clone 395156 (TRAV12-1, TRAJ16)
CVVNGPDGQKLLF

SEQ ID NO: 790312 - protein, 13 aa, Homo sapiens
  CDR3 for beta chain variable domain of TCR clone 395156 (TRBV2, TRBJ1-1)
CARHPTGGFHAFF

SEQ ID NO: 790313 - protein, 12 aa, Homo sapiens
  CDR3 for alpha chain variable domain of TCR clone 395157 (TRAV13-2, TRAJ23)
CAERHRGGKLIF

SEQ ID NO: 790314 - protein, 16 aa, Homo sapiens
  CDR3 for beta chain variable domain of TCR clone 395157 (TRBV5-5, TRBJ2-2)
CASSGRREGATGELFF

SEQ ID NO: 790315 - protein, 14 aa, Homo sapiens
  CDR3 for alpha chain variable domain of TCR clone 395158 (TRAV17, TRAJ31)
CATVLRNNNARLMF

SEQ ID NO: 790316 - protein, 18 aa, Homo sapiens
  CDR3 for beta chain variable domain of TCR clone 395158 (TRBV12-4, TRBJ2-2)
CASSLVAGTRGRTGELFF

SEQ ID NO: 790317 - protein, 21 aa, Homo sapiens
  CDR3 for alpha chain variable domain of TCR clone 395159 (TRAV26-1, TRAJ38)
CIADNAGNNHIQNPDPAVYQL

SEQ ID NO: 790318 - protein, 14 aa, Homo sapiens
  CDR3 for beta chain variable domain of TCR clone 395159 (TRBV12-4, TRBJ1-1)
CASSLGTGGTEAFF

SEQ ID NO: 790319 - protein, 12 aa, Homo sapiens
  CDR3 for alpha chain variable domain of TCR clone 395160 (TRAV13-1, TRAJ21)
CAAKEGFNKFYF

SEQ ID NO: 790320 - protein, 19 aa, Homo sapiens
  CDR3 for beta chain variable domain of TCR clone 395160 (TRBV7-2, TRBJ2-3)
CASSSQGGPRLAGADTQYF

SEQ ID NO: 790321 - protein, 16 aa, Homo sapiens
  CDR3 for alpha chain variable domain of TCR clone 395161 (TRAV12-3, TRAJ58)
CAMTDTEETRGSRLTF

SEQ ID NO: 790322 - protein, 22 aa, Homo sapiens
  CDR3 for beta chain variable domain of TCR clone 395161 (TRBV23-1, TRBJ2-7)
CASSRRLDSGQGYVGGGYEQYF

SEQ ID NO: 790323 - protein, 15 aa, Homo sapiens
  CDR3 for alpha chain variable domain of TCR clone 395162 (TRAV26-1, TRAJ39)
CIVRVVGDAGNMLTF

SEQ ID NO: 790324 - protein, 15 aa, Homo sapiens
  CDR3 for beta chain variable domain of TCR clone 395162 (TRBV2, TRBJ2-7)
CASSEGLARSYEQYF

SEQ ID NO: 790325 - protein, 13 aa, Homo sapiens
  CDR3 for alpha chain variable domain of TCR clone 395163 (TRAV16, TRAJ58)
CALSIPSGSRLTF

SEQ ID NO: 790326 - protein, 14 aa, Homo sapiens
  CDR3 for beta chain variable domain of TCR clone 395163 (TRBV6-5, TRBJ2-7)
CASSTHRGLREQYF

SEQ ID NO: 790327 - protein, 16 aa, Homo sapiens
  CDR3 for alpha chain variable domain of TCR clone 395164 (TRAV14/DV4, TRAJ54)
CAMREGRIQGAQKLVF

SEQ ID NO: 790328 - protein, 16 aa, Homo sapiens
  CDR3 for beta chain variable domain of TCR clone 395164 (TRBV12-4, TRBJ1-5)
CASSRPVGGSNQPQHF

SEQ ID NO: 790329 - protein, 14 aa, Homo sapiens
  CDR3 for alpha chain variable domain of TCR clone 395165 (TRAV1-1, TRAJ27)
CAVIYNTNEGKSTF

SEQ ID NO: 790330 - protein, 13 aa, Homo sapiens
  CDR3 for beta chain variable domain of TCR clone 395165 (TRBV4-1, TRBJ2-2)
CASSQENTGELFF

SEQ ID NO: 790331 - protein, 13 aa, Homo sapiens
  CDR3 for alpha chain variable domain of TCR clone 395166 (TRAV25, TRAJ30)
CAGRVDRDDKIIF

SEQ ID NO: 790332 - protein, 17 aa, Homo sapiens
  CDR3 for beta chain variable domain of TCR clone 395166 (TRBV4-1, TRBJ2-7)
CASSRDPLGVRGGEQYF

SEQ ID NO: 790333 - protein, 12 aa, Homo sapiens
  CDR3 for alpha chain variable domain of TCR clone 395167 (TRAV8-3, TRAJ26)
CAGDNYGQNFVF

SEQ ID NO: 790334 - protein, 12 aa, Homo sapiens
  CDR3 for beta chain variable domain of TCR clone 395167 (TRBV11-2, TRBJ2-2)
CASSLGCGELFF

SEQ ID NO: 790335 - protein, 15 aa, Homo sapiens
  CDR3 for alpha chain variable domain of TCR clone 395168 (TRAV12-3, TRAJ13)
CAMSARSGGYQKVPF

SEQ ID NO: 790336 - protein, 18 aa, Homo sapiens
  CDR3 for beta chain variable domain of TCR clone 395168 (TRBV3-1, TRBJ2-7)
CASSQEGGGRSWHYEQYF

SEQ ID NO: 790337 - protein, 12 aa, Homo sapiens
  CDR3 for alpha chain variable domain of TCR clone 395169 (TRAV12-1, TRAJ40)
CVVYSGTYKYVF

SEQ ID NO: 790338 - protein, 17 aa, Homo sapiens
  CDR3 for beta chain variable domain of TCR clone 395169 (TRBV11-3, TRBJ1-5)
CASSPLTGLRGNQPQHF

SEQ ID NO: 790339 - protein, 22 aa, Homo sapiens
  CDR3 for alpha chain variable domain of TCR clone 395170 (TRAV1-1, TRAJ30)
CAVRDQTEMTRSSLEKGHDFIF

SEQ ID NO: 790340 - protein, 11 aa, Homo sapiens
  CDR3 for beta chain variable domain of TCR clone 395170 (TRBV13, TRBJ2-2)
CASSPRTGEHT

SEQ ID NO: 790341 - protein, 13 aa, Homo sapiens
  CDR3 for alpha chain variable domain of TCR clone 395171 (TRAV12-2, TRAJ18)
CAVRGSTLGRLYF

SEQ ID NO: 790342 - protein, 16 aa, Homo sapiens
  CDR3 for beta chain variable domain of TCR clone 395171 (TRBV7-9, TRBJ1-2)
CASSPGGGAINYGYTF

SEQ ID NO: 790343 - protein, 14 aa, Homo sapiens
  CDR3 for alpha chain variable domain of TCR clone 395172 (TRAV2, TRAJ9)
CAVEDRSGGFKTIF

SEQ ID NO: 790344 - protein, 12 aa, Homo sapiens
  CDR3 for beta chain variable domain of TCR clone 395172 (TRBV11-2, TRBJ2-1)
CASSPGNNEPFF

SEQ ID NO: 790345 - protein, 15 aa, Homo sapiens
  CDR3 for alpha chain variable domain of TCR clone 395173 (TRAV3, TRAJ22)
CAVRDRGGSARPLAF

SEQ ID NO: 790346 - protein, 13 aa, Homo sapiens
  CDR3 for beta chain variable domain of TCR clone 395173 (TRBV7-3, TRBJ2-1)
CASSPVAYNEQFF

SEQ ID NO: 790347 - protein, 15 aa, Homo sapiens
  CDR3 for alpha chain variable domain of TCR clone 395174 (TRAV29/DV5, TRAJ29)
CAASERCSGNTPLVF

SEQ ID NO: 790348 - protein, 17 aa, Homo sapiens
  CDR3 for beta chain variable domain of TCR clone 395174 (TRBV4-1, TRBJ1-4)
CASSQEGPRGVEEKLFF

SEQ ID NO: 790349 - protein, 16 aa, Homo sapiens
  CDR3 for alpha chain variable domain of TCR clone 395175 (TRAV8-4, TRAJ52)
CAVRLEGGTSYGKLTF

SEQ ID NO: 790350 - protein, 15 aa, Homo sapiens
  CDR3 for beta chain variable domain of TCR clone 395175 (TRBV7-9, TRBJ2-7)
CASSPGGGLTYEQYF

SEQ ID NO: 790351 - protein, 16 aa, Homo sapiens
  CDR3 for alpha chain variable domain of TCR clone 395176 (TRAV3, TRAJ3)
CAVRDRAKSSASKIIF

SEQ ID NO: 790352 - protein, 16 aa, Homo sapiens
  CDR3 for beta chain variable domain of TCR clone 395176 (TRBV7-8, TRBJ2-6)
CQQRRDRGAGANVLTF

SEQ ID NO: 790353 - protein, 10 aa, Homo sapiens
  CDR3 for alpha chain variable domain of TCR clone 395177 (TRAV8-4, TRAJ39)
CAVAGNMLTF

SEQ ID NO: 790354 - protein, 15 aa, Homo sapiens
  CDR3 for beta chain variable domain of TCR clone 395177 (TRBV20-1, TRBJ2-1)
CSARGIGGTYNEQFF

SEQ ID NO: 790355 - protein, 14 aa, Homo sapiens
  CDR3 for alpha chain variable domain of TCR clone 395178 (TRAV26-1, TRAJ38)
RIADNAGNNRKLIW

SEQ ID NO: 790356 - protein, 17 aa, Homo sapiens
  CDR3 for beta chain variable domain of TCR clone 395178 (TRBV15, TRBJ1-1)
CATSRMGGADGDTEAFF

SEQ ID NO: 790357 - protein, 17 aa, Homo sapiens
  CDR3 for alpha chain variable domain of TCR clone 395179 (TRAV8-6, TRAJ58)
CAVSSWVGETSGSMLTF

SEQ ID NO: 790358 - protein, 14 aa, Homo sapiens
  CDR3 for beta chain variable domain of TCR clone 395179 (TRBV2, TRBJ2-7)
CASRPPGGHYEQYF

SEQ ID NO: 790359 - protein, 11 aa, Homo sapiens
  CDR3 for alpha chain variable domain of TCR clone 395180 (TRAV8-3, TRAJ15)
CAVGPGTALIF

SEQ ID NO: 790360 - protein, 15 aa, Homo sapiens
  CDR3 for beta chain variable domain of TCR clone 395180 (TRBV7-9, TRBJ2-7)
CVSSLALAEAYDQYF

SEQ ID NO: 790361 - protein, 15 aa, Homo sapiens
  CDR3 for alpha chain variable domain of TCR clone 395181 (TRAV26-1, TRAJ40)
CIVRVTTSGTYKYIF

SEQ ID NO: 790362 - protein, 15 aa, Homo sapiens
  CDR3 for beta chain variable domain of TCR clone 395181 (TRBV13, TRBJ2-1)
CASSLLSGLNNEQFF

SEQ ID NO: 790363 - protein, 11 aa, Homo sapiens
  CDR3 for alpha chain variable domain of TCR clone 395182 (TRAV35, TRAJ34)
CWARNTDKLIF

SEQ ID NO: 790364 - protein, 15 aa, Homo sapiens
  CDR3 for beta chain variable domain of TCR clone 395182 (TRBV7-9, TRBJ1-4)
CASSARTGGNEKLFF

SEQ ID NO: 790365 - protein, 12 aa, Homo sapiens
  CDR3 for alpha chain variable domain of TCR clone 395183 (TRAV20, TRAJ31)
CAVQADNARLMF

SEQ ID NO: 790366 - protein, 16 aa, Homo sapiens
  CDR3 for beta chain variable domain of TCR clone 395183 (TRBV4-2, TRBJ2-1)
CASSQGEGRTVNEQFF

SEQ ID NO: 790367 - protein, 12 aa, Homo sapiens
  CDR3 for alpha chain variable domain of TCR clone 395184 (TRAV13-2, TRAJ23)
CAERHRGGQLIF

SEQ ID NO: 790368 - protein, 15 aa, Homo sapiens
  CDR3 for beta chain variable domain of TCR clone 395184 (TRBV12-4, TRBJ1-6)
CASSLGGQGNSTLHF

SEQ ID NO: 790369 - protein, 20 aa, Homo sapiens
  CDR3 for alpha chain variable domain of TCR clone 395185 (TRAV8-2, TRAJ8)
CVVSDRSADEHRLSETCIWN

SEQ ID NO: 790370 - protein, 15 aa, Homo sapiens
  CDR3 for beta chain variable domain of TCR clone 395185 (TRBV3-1, TRBJ2-5)
CASSANLGGPETQYF

SEQ ID NO: 790371 - protein, 15 aa, Homo sapiens
  CDR3 for alpha chain variable domain of TCR clone 395186 (TRAV8-3, TRAJ32)
DAAEYFCGATNKLIF

SEQ ID NO: 790372 - protein, 16 aa, Homo sapiens
  CDR3 for beta chain variable domain of TCR clone 395186 (TRBV7-2, TRBJ1-3)
CASSSGRVLSGNTMYF

SEQ ID NO: 790373 - protein, 17 aa, Homo sapiens
  CDR3 for alpha chain variable domain of TCR clone 395187 (TRAV3, TRAJ22)
VLLSVRDRGGSARQLTF

SEQ ID NO: 790374 - protein, 15 aa, Homo sapiens
  CDR3 for beta chain variable domain of TCR clone 395187 (TRBV27, TRBJ2-1)
CASSNGGGSSNEQFF

SEQ ID NO: 790375 - protein, 10 aa, Homo sapiens
  CDR3 for alpha chain variable domain of TCR clone 395188 (TRAV21, TRAJ31)
CAADNARLMF

SEQ ID NO: 790376 - protein, 17 aa, Homo sapiens
  CDR3 for beta chain variable domain of TCR clone 395188 (TRBV4-2, TRBJ1-1)
CASSQVATGGMNTEAFF

SEQ ID NO: 790377 - protein, 12 aa, Homo sapiens
  CDR3 for alpha chain variable domain of TCR clone 395189 (TRAV8-6, TRAJ13)
CAVSGGYQKVTF

SEQ ID NO: 790378 - protein, 13 aa, Homo sapiens
  CDR3 for beta chain variable domain of TCR clone 395189 (TRBV7-9, TRBJ2-3)
CASSPGSTDTQYF

SEQ ID NO: 790379 - protein, 11 aa, Homo sapiens
  CDR3 for alpha chain variable domain of TCR clone 395190 (TRAV1-1, TRAJ23)
CAVRQGGKLIF

SEQ ID NO: 790380 - protein, 16 aa, Homo sapiens
  CDR3 for beta chain variable domain of TCR clone 395190 (TRBV6-1, TRBJ1-2)
CASSGAWQGRSHGYTF

SEQ ID NO: 790381 - protein, 16 aa, Homo sapiens
  CDR3 for alpha chain variable domain of TCR clone 395191 (TRAV3, TRAJ37)
CAVREKGSGNTGKLIF

SEQ ID NO: 790382 - protein, 12 aa, Homo sapiens
  CDR3 for beta chain variable domain of TCR clone 395191 (TRBV11-2, TRBJ2-2)
CASSLGGGELFF

SEQ ID NO: 790383 - protein, 14 aa, Homo sapiens
  CDR3 for alpha chain variable domain of TCR clone 395192 (TRAV1-2, TRAJ8)
CAVREDTGFQKLVF

SEQ ID NO: 790384 - protein, 16 aa, Homo sapiens
  CDR3 for beta chain variable domain of TCR clone 395192 (TRBV12-4, TRBJ1-5)
CASSRPVGGSHQPQHF

SEQ ID NO: 790385 - protein, 14 aa, Homo sapiens
  CDR3 for alpha chain variable domain of TCR clone 395193 (TRAV1-2, TRAJ16)
CAVNRCSDGQKLLF

SEQ ID NO: 790386 - protein, 11 aa, Homo sapiens
  CDR3 for beta chain variable domain of TCR clone 395193 (TRBV29-1, TRBJ2-5)
CSEDRTGTQYF

SEQ ID NO: 790387 - protein, 17 aa, Homo sapiens
  CDR3 for alpha chain variable domain of TCR clone 395194 (TRAV16, TRAJ58)
CITVLSNGETSGSRLTF

SEQ ID NO: 790388 - protein, 17 aa, Homo sapiens
  CDR3 for beta chain variable domain of TCR clone 395194 (TRBV18, TRBJ2-1)
CASSKGLSGGADNEQFI

SEQ ID NO: 790389 - protein, 14 aa, Homo sapiens
  CDR3 for alpha chain variable domain of TCR clone 395195 (TRAV3, TRAJ21)
FAVRDAYNFNKFYF

SEQ ID NO: 790390 - protein, 15 aa, Homo sapiens
  CDR3 for beta chain variable domain of TCR clone 395195 (TRBV6-5, TRBJ1-5)
CASSYSWDSNQPQHF

SEQ ID NO: 790391 - protein, 14 aa, Homo sapiens
  CDR3 for alpha chain variable domain of TCR clone 395196 (TRAV12-3, TRAJ9)
CAMSPNTGGFKTIF

SEQ ID NO: 790392 - protein, 13 aa, Homo sapiens
  CDR3 for beta chain variable domain of TCR clone 395196 (TRBV12-4, TRBJ1-2)
CASSLDSNYGYTF

SEQ ID NO: 790393 - protein, 17 aa, Homo sapiens
  CDR3 for alpha chain variable domain of TCR clone 395197 (TRAV8-6, TRAJ4)
CAVSEKMVFGAGTRLAV

SEQ ID NO: 790394 - protein, 13 aa, Homo sapiens
  CDR3 for beta chain variable domain of TCR clone 395197 (TRBV20-1, TRBJ1-1)
QCTNTDWGTEAFF

SEQ ID NO: 790395 - protein, 11 aa, Homo sapiens
  CDR3 for alpha chain variable domain of TCR clone 395198 (TRAV2, TRAJ33)
CAVDSNYQLIW

SEQ ID NO: 790396 - protein, 14 aa, Homo sapiens
  CDR3 for beta chain variable domain of TCR clone 395198 (TRBV6-6, TRBJ2-7)
CASSDSGAGYEQYF

SEQ ID NO: 790397 - protein, 11 aa, Homo sapiens
  CDR3 for alpha chain variable domain of TCR clone 395199 (TRAV1-2, TRAJ20)
CAVANDYKLSF

SEQ ID NO: 790398 - protein, 14 aa, Homo sapiens
  CDR3 for beta chain variable domain of TCR clone 395199 (TRBV6-1, TRBJ1-3)
CASVQGGGGNTMYF

SEQ ID NO: 790399 - protein, 13 aa, Homo sapiens
  CDR3 for alpha chain variable domain of TCR clone 395200 (TRAV8-1, TRAJ23)
CAVTGGQGGKLIF

SEQ ID NO: 790400 - protein, 14 aa, Homo sapiens
  CDR3 for beta chain variable domain of TCR clone 395200 (TRBV7-8, TRBJ1-2)
CASSAGTAIYGYTF

SEQ ID NO: 790401 - protein, 13 aa, Homo sapiens
  CDR3 for alpha chain variable domain of TCR clone 395201 (TRAV12-2, TRAJ50)
CAVIVTSYDKVIF

SEQ ID NO: 790402 - protein, 15 aa, Homo sapiens
  CDR3 for beta chain variable domain of TCR clone 395201 (TRBV11-2, TRBJ2-1)
CASSLGTSGLNEQFF

SEQ ID NO: 790403 - protein, 14 aa, Homo sapiens
  CDR3 for alpha chain variable domain of TCR clone 395202 (TRAV12-2, TRAJ13)
CAVKKTGGYQKVTC

SEQ ID NO: 790404 - protein, 14 aa, Homo sapiens
  CDR3 for beta chain variable domain of TCR clone 395202 (TRBV12-5, TRBJ2-5)
CASGARTHQETQYF

SEQ ID NO: 790405 - protein, 14 aa, Homo sapiens
  CDR3 for alpha chain variable domain of TCR clone 395203 (TRAV13-2, TRAJ23)
CAENIGPVGGKLIF

SEQ ID NO: 790406 - protein, 16 aa, Homo sapiens
  CDR3 for beta chain variable domain of TCR clone 395203 (TRBV24-1, TRBJ2-2)
CATSDTGQGGTGELFF

SEQ ID NO: 790407 - protein, 14 aa, Homo sapiens
  CDR3 for alpha chain variable domain of TCR clone 395204 (TRAV1-1, TRAJ27)
CAVIYNTNAGKSTY

SEQ ID NO: 790408 - protein, 14 aa, Homo sapiens
  CDR3 for beta chain variable domain of TCR clone 395204 (TRBV5-1, TRBJ2-3)
CASSLFRPTDTQYF

SEQ ID NO: 790409 - protein, 12 aa, Homo sapiens
  CDR3 for alpha chain variable domain of TCR clone 395205 (TRAV22, TRAJ22)
CAPGGSARQLTF

SEQ ID NO: 790410 - protein, 13 aa, Homo sapiens
  CDR3 for beta chain variable domain of TCR clone 395205 (TRBV7-9, TRBJ1-2)
CASSLKQNYGYTF

SEQ ID NO: 790411 - protein, 14 aa, Homo sapiens
  CDR3 for alpha chain variable domain of TCR clone 395206 (TRAV29/DV5, TRAJ48)
CAAMALFGNEKLTL

SEQ ID NO: 790412 - protein, 15 aa, Homo sapiens
  CDR3 for beta chain variable domain of TCR clone 395206 (TRBV7-2, TRBJ2-1)
CASTHGTGIYNEQFF

SEQ ID NO: 790413 - protein, 16 aa, Homo sapiens
  CDR3 for alpha chain variable domain of TCR clone 395207 (TRAV30, TRAJ28)
CGTDKYSGAGSYQLTF

SEQ ID NO: 790414 - protein, 15 aa, Homo sapiens
  CDR3 for beta chain variable domain of TCR clone 395207 (TRBV6-6, TRBJ2-7)
CASSYSYGGSYEQYF

SEQ ID NO: 790415 - protein, 17 aa, Homo sapiens
  CDR3 for alpha chain variable domain of TCR clone 395208 (TRAV17, TRAJ28)
CATRDSLSGAGSYQLTF

SEQ ID NO: 790416 - protein, 14 aa, Homo sapiens
  CDR3 for beta chain variable domain of TCR clone 395208 (TRBV7-6, TRBJ2-3)
CASSLGTVTDTQYF

SEQ ID NO: 790417 - protein, 13 aa, Homo sapiens
  CDR3 for alpha chain variable domain of TCR clone 395209 (TRAV12-2, TRAJ4)
CAGSSGGYNKLIF

SEQ ID NO: 790418 - protein, 14 aa, Homo sapiens
  CDR3 for beta chain variable domain of TCR clone 395209 (TRBV24-1, TRBJ1-1)
CATSIPRGDTEAFF

SEQ ID NO: 790419 - protein, 15 aa, Homo sapiens
  CDR3 for alpha chain variable domain of TCR clone 395210 (TRAV8-3, TRAJ15)
CAVGAANQAGTALIF

SEQ ID NO: 790420 - protein, 14 aa, Homo sapiens
  CDR3 for beta chain variable domain of TCR clone 395210 (TRBV20-1, TRBJ2-1)
CSPSDEASYNEQFF

SEQ ID NO: 790421 - protein, 12 aa, Homo sapiens
  CDR3 for alpha chain variable domain of TCR clone 395211 (TRAV21, TRAJ8)
CAVNTGFLKLVF

SEQ ID NO: 790422 - protein, 13 aa, Homo sapiens
  CDR3 for beta chain variable domain of TCR clone 395211 (TRBV6-3, TRBJ2-1)
CASSYDNYNEQFF

SEQ ID NO: 790423 - protein, 15 aa, Homo sapiens
  CDR3 for alpha chain variable domain of TCR clone 395212 (TRAV12-3, TRAJ54)
CAMSPPFQGAQKLVF

SEQ ID NO: 790424 - protein, 15 aa, Homo sapiens
  CDR3 for beta chain variable domain of TCR clone 395212 (TRBV20-1, TRBJ2-7)
CSARDRVSGVDEQYF

SEQ ID NO: 790425 - protein, 12 aa, Homo sapiens
  CDR3 for alpha chain variable domain of TCR clone 395213 (TRAV8-3, TRAJ26)
CAGDNYGQNFVF

SEQ ID NO: 790426 - protein, 13 aa, Homo sapiens
  CDR3 for beta chain variable domain of TCR clone 395213 (TRBV7-2, TRBJ2-2)
CASSSVRAGELFF

SEQ ID NO: 790427 - protein, 14 aa, Homo sapiens
  CDR3 for alpha chain variable domain of TCR clone 395214 (TRAV1-2, TRAJ16)
CAANRFSDGQKLPF

SEQ ID NO: 790428 - protein, 14 aa, Homo sapiens
  CDR3 for beta chain variable domain of TCR clone 395214 (TRBV7-9, TRBJ2-3)
CASSLEDGTDTQYF

SEQ ID NO: 790429 - protein, 14 aa, Homo sapiens
  CDR3 for alpha chain variable domain of TCR clone 395215 (TRAV20, TRAJ42)
CAVQAGGSQGNLIF

SEQ ID NO: 790430 - protein, 16 aa, Homo sapiens
  CDR3 for beta chain variable domain of TCR clone 395215 (TRBV28, TRBJ2-7)
CASSLFFETGGPEQYF

SEQ ID NO: 790431 - protein, 16 aa, Homo sapiens
  CDR3 for alpha chain variable domain of TCR clone 395216 (TRAV17, TRAJ53)
CATDALSGGSDYKLTF

SEQ ID NO: 790432 - protein, 12 aa, Homo sapiens
  CDR3 for beta chain variable domain of TCR clone 395216 (TRBV5-1, TRBJ2-7)
CASSFRGYEQYF

SEQ ID NO: 790433 - protein, 15 aa, Homo sapiens
  CDR3 for alpha chain variable domain of TCR clone 395217 (TRAV14/DV4, TRAJ12)
CAMREERDSSYKLIF

SEQ ID NO: 790434 - protein, 16 aa, Homo sapiens
  CDR3 for beta chain variable domain of TCR clone 395217 (TRBV19, TRBJ1-1)
CASRPRSEALNTEAFF

SEQ ID NO: 790435 - protein, 15 aa, Homo sapiens
  CDR3 for alpha chain variable domain of TCR clone 395218 (TRAV3, TRAJ22)
CAVRDRGGSARQLTF

SEQ ID NO: 790436 - protein, 13 aa, Homo sapiens
  CDR3 for beta chain variable domain of TCR clone 395218 (TRBV7-3, TRBJ2-1)
CASSPVAYNEHFF

SEQ ID NO: 790437 - protein, 16 aa, Homo sapiens
  CDR3 for alpha chain variable domain of TCR clone 395219 (TRAV3, TRAJ3)
CAVRDRAKSSASKIIF

SEQ ID NO: 790438 - protein, 14 aa, Homo sapiens
  CDR3 for beta chain variable domain of TCR clone 395219 (TRBV6-1, TRBJ1-3)
CASVQGGGGNTIYF

SEQ ID NO: 790439 - protein, 17 aa, Homo sapiens
  CDR3 for alpha chain variable domain of TCR clone 395220 (TRAV3, TRAJ6)
CAVRDGPRAGGSYIPTF

SEQ ID NO: 790440 - protein, 14 aa, Homo sapiens
  CDR3 for beta chain variable domain of TCR clone 395220 (TRBV2, TRBJ2-5)
CASTWGRAQETQYF

SEQ ID NO: 790441 - protein, 19 aa, Homo sapiens
  CDR3 for alpha chain variable domain of TCR clone 395221 (TRAV23/DV6, TRAJ9)
CSKHRLKGPGHTGGFKTIF

SEQ ID NO: 790442 - protein, 15 aa, Homo sapiens
  CDR3 for beta chain variable domain of TCR clone 395221 (TRBV6-3, TRBJ2-1)
CASSYASDSYNEQFF

SEQ ID NO: 790443 - protein, 15 aa, Homo sapiens
  CDR3 for alpha chain variable domain of TCR clone 395222 (TRAV3, TRAJ17)
CAVRDGPAAGKKLTF

SEQ ID NO: 790444 - protein, 12 aa, Homo sapiens
  CDR3 for beta chain variable domain of TCR clone 395222 (TRBV12-4, TRBJ2-1)
CASSPGRNEQFF

SEQ ID NO: 790445 - protein, 15 aa, Homo sapiens
  CDR3 for alpha chain variable domain of TCR clone 395223 (TRAV26-1, TRAJ22)
CIVRVSFWFRKATDL

SEQ ID NO: 790446 - protein, 16 aa, Homo sapiens
  CDR3 for beta chain variable domain of TCR clone 395223 (TRBV7-9, TRBJ1-2)
CASSLGFSSGEDGYTF

SEQ ID NO: 790447 - protein, 14 aa, Homo sapiens
  CDR3 for alpha chain variable domain of TCR clone 395224 (TRAV8-3, TRAJ21)
CAVDARDNFNKFYF

SEQ ID NO: 790448 - protein, 16 aa, Homo sapiens
  CDR3 for beta chain variable domain of TCR clone 395224 (TRBV20-1, TRBJ2-1)
CSARDLAGHSYKEQFF

SEQ ID NO: 790449 - protein, 16 aa, Homo sapiens
  CDR3 for alpha chain variable domain of TCR clone 395225 (TRAV30, TRAJ24)
CCTEIVDADSGGKFQF

SEQ ID NO: 790450 - protein, 14 aa, Homo sapiens
  CDR3 for beta chain variable domain of TCR clone 395225 (TRBV12-5, TRBJ2-5)
CASGSRTHQETQYF

SEQ ID NO: 790451 - protein, 16 aa, Homo sapiens
  CDR3 for alpha chain variable domain of TCR clone 395226 (TRAV16, TRAJ52)
FALSAAGGTSYGKLTF

SEQ ID NO: 790452 - protein, 17 aa, Homo sapiens
  CDR3 for beta chain variable domain of TCR clone 395226 (TRBV11-2, TRBJ2-1)
CVSSLYPPGVEYNEQFF

SEQ ID NO: 790453 - protein, 12 aa, Homo sapiens
  CDR3 for alpha chain variable domain of TCR clone 395227 (TRAV8-3, TRAJ26)
CAGDNYGQNFVF

SEQ ID NO: 790454 - protein, 13 aa, Homo sapiens
  CDR3 for beta chain variable domain of TCR clone 395227 (TRBV20-1, TRBJ2-3)
CSADQGVSDTQYF

SEQ ID NO: 790455 - protein, 14 aa, Homo sapiens
  CDR3 for alpha chain variable domain of TCR clone 395228 (TRAV12-1, TRAJ43)
CVVNGRSNNNDMRF

SEQ ID NO: 790456 - protein, 15 aa, Homo sapiens
  CDR3 for beta chain variable domain of TCR clone 395228 (TRBV27, TRBJ2-1)
CASSNGGGSSNEQFF

SEQ ID NO: 790457 - protein, 13 aa, Homo sapiens
  CDR3 for alpha chain variable domain of TCR clone 395229 (TRAV21, TRAJ27)
CAARPGNAGKSTF

SEQ ID NO: 790458 - protein, 13 aa, Homo sapiens
  CDR3 for beta chain variable domain of TCR clone 395229 (TRBV20-1, TRBJ1-1)
CSARGGGNTEAFV

SEQ ID NO: 790459 - protein, 19 aa, Homo sapiens
  CDR3 for alpha chain variable domain of TCR clone 395230 (TRAV26-1, TRAJ52)
CIVKAHRNAGGASYGKLTF

SEQ ID NO: 790460 - protein, 15 aa, Homo sapiens
  CDR3 for beta chain variable domain of TCR clone 395230 (TRBV29-1, TRBJ2-1)
CSGRDRKSSYNEQFF

SEQ ID NO: 790461 - protein, 16 aa, Homo sapiens
  CDR3 for alpha chain variable domain of TCR clone 395231 (TRAV13-2, TRAJ22)
CAENRGSSGSSRQLTF

SEQ ID NO: 790462 - protein, 17 aa, Homo sapiens
  CDR3 for beta chain variable domain of TCR clone 395231 (TRBV14, TRBJ2-1)
CASSQDRRVSSYNEQFF

SEQ ID NO: 790463 - protein, 13 aa, Homo sapiens
  CDR3 for alpha chain variable domain of TCR clone 395232 (TRAV12-2, TRAJ20)
CAVYPSNDYKLSF

SEQ ID NO: 790464 - protein, 15 aa, Homo sapiens
  CDR3 for beta chain variable domain of TCR clone 395232 (TRBV7-9, TRBJ2-5)
CASSRRTGGGETQYF

SEQ ID NO: 790465 - protein, 16 aa, Homo sapiens
  CDR3 for alpha chain variable domain of TCR clone 395233 (TRAV14/DV4, TRAJ11)
CAMREGGNSGYSTLTF

SEQ ID NO: 790466 - protein, 15 aa, Homo sapiens
  CDR3 for beta chain variable domain of TCR clone 395233 (TRBV20-1, TRBJ2-7)
CSARDRVSGMDEQYF

SEQ ID NO: 790467 - protein, 14 aa, Homo sapiens
  CDR3 for alpha chain variable domain of TCR clone 395234 (TRAV3, TRAJ40)
CSVRDRRGTYKYIF

SEQ ID NO: 790468 - protein, 13 aa, Homo sapiens
  CDR3 for beta chain variable domain of TCR clone 395234 (TRBV7-6, TRBJ1-2)
CASSLVADYGYTF

SEQ ID NO: 790469 - protein, 11 aa, Homo sapiens
  CDR3 for alpha chain variable domain of TCR clone 395235 (TRAV12-2, TRAJ33)
CAVTSNYQLIW

SEQ ID NO: 790470 - protein, 17 aa, Homo sapiens
  CDR3 for beta chain variable domain of TCR clone 395235 (TRBV28, TRBJ2-5)
CASSTPEGDALQETQYF

SEQ ID NO: 790471 - protein, 12 aa, Homo sapiens
  CDR3 for alpha chain variable domain of TCR clone 395236 (TRAV12-3, TRAJ17)
CAMTPTGNKLTF

SEQ ID NO: 790472 - protein, 15 aa, Homo sapiens
  CDR3 for beta chain variable domain of TCR clone 395236 (TRBV20-1, TRBJ2-7)
CSARDRVSGMDEQCF

SEQ ID NO: 790473 - protein, 14 aa, Homo sapiens
  CDR3 for alpha chain variable domain of TCR clone 395237 (TRAV30, TRAJ33)
CGTERRFSNYQLIL

SEQ ID NO: 790474 - protein, 16 aa, Homo sapiens
  CDR3 for beta chain variable domain of TCR clone 395237 (TRBV7-3, TRBJ2-2)
CASSLKRGTLSGELFF

SEQ ID NO: 790475 - protein, 11 aa, Homo sapiens
  CDR3 for alpha chain variable domain of TCR clone 395238 (TRAV12-3, TRAJ43)
CAMSVSNDMRF

SEQ ID NO: 790476 - protein, 13 aa, Homo sapiens
  CDR3 for beta chain variable domain of TCR clone 395238 (TRBV19, TRBJ2-1)
CASSMYRVNEQFF

SEQ ID NO: 790477 - protein, 15 aa, Homo sapiens
  CDR3 for alpha chain variable domain of TCR clone 395239 (TRAV38-1, TRAJ57)
CAFMDSQGGSEKLVF

SEQ ID NO: 790478 - protein, 16 aa, Homo sapiens
  CDR3 for beta chain variable domain of TCR clone 395239 (TRBV10-3, TRBJ2-1)
CAIRGGGRGDYNDQFF

SEQ ID NO: 790479 - protein, 18 aa, Homo sapiens
  CDR3 for alpha chain variable domain of TCR clone 395240 (TRAV1-2, TRAJ18)
CAVRDMGDRGSTLGRLYF

SEQ ID NO: 790480 - protein, 17 aa, Homo sapiens
  CDR3 for beta chain variable domain of TCR clone 395240 (TRBV11-2, TRBJ2-1)
CASSLYPPGVEYNEQFF

SEQ ID NO: 790481 - protein, 12 aa, Homo sapiens
  CDR3 for alpha chain variable domain of TCR clone 395241 (TRAV12-2, TRAJ7)
CAVMRGNNRLAF

SEQ ID NO: 790482 - protein, 17 aa, Homo sapiens
  CDR3 for beta chain variable domain of TCR clone 395241 (TRBV7-9, TRBJ2-3)
CAGSPTVAGDLTDTQYF

SEQ ID NO: 790483 - protein, 14 aa, Homo sapiens
  CDR3 for alpha chain variable domain of TCR clone 395242 (TRAV8-1, TRAJ5)
CAVRTDTGRRARTL

SEQ ID NO: 790484 - protein, 15 aa, Homo sapiens
  CDR3 for beta chain variable domain of TCR clone 395242 (TRBV9, TRBJ1-6)
CASSVAGTGDSPLHF

SEQ ID NO: 790485 - protein, 18 aa, Homo sapiens
  CDR3 for alpha chain variable domain of TCR clone 395243 (TRAV12-3, TRAJ52)
CAMSVGGAGGTSYGKLTF

SEQ ID NO: 790486 - protein, 12 aa, Homo sapiens
  CDR3 for beta chain variable domain of TCR clone 395243 (TRBV12-4, TRBJ2-1)
CASSPGRNEQFF

SEQ ID NO: 790487 - protein, 15 aa, Homo sapiens
  CDR3 for alpha chain variable domain of TCR clone 395244 (TRAV8-2, TRAJ28)
CVVSESGAGSYQLTF

SEQ ID NO: 790488 - protein, 16 aa, Homo sapiens
  CDR3 for beta chain variable domain of TCR clone 395244 (TRBV11-2, TRBJ1-1)
CASSLRQGGEHSKAFF

SEQ ID NO: 790489 - protein, 13 aa, Homo sapiens
  CDR3 for alpha chain variable domain of TCR clone 395245 (TRAV1-2, TRAJ33)
CSVIEDSNYQLIW

SEQ ID NO: 790490 - protein, 16 aa, Homo sapiens
  CDR3 for beta chain variable domain of TCR clone 395245 (TRBV4-2, TRBJ2-7)
CASSQDGVERGYEQYF

SEQ ID NO: 790491 - protein, 10 aa, Homo sapiens
  CDR3 for alpha chain variable domain of TCR clone 395246 (TRAV16, TRAJ16)
CPGQKLLFAR

SEQ ID NO: 790492 - protein, 16 aa, Homo sapiens
  CDR3 for beta chain variable domain of TCR clone 395246 (TRBV20-1, TRBJ1-1)
CSARALTQGMNTEAFF

SEQ ID NO: 790493 - protein, 17 aa, Homo sapiens
  CDR3 for alpha chain variable domain of TCR clone 395247 (TRAV3, TRAJ42)
CAVRDRDYGGSQGKLIF

SEQ ID NO: 790494 - protein, 13 aa, Homo sapiens
  CDR3 for beta chain variable domain of TCR clone 395247 (TRBV10-2, TRBJ2-7)
CASGASGGYEQYF

SEQ ID NO: 790495 - protein, 14 aa, Homo sapiens
  CDR3 for alpha chain variable domain of TCR clone 395248 (TRAV13-1, TRAJ40)
CAASMTSGTYKYIF

SEQ ID NO: 790496 - protein, 15 aa, Homo sapiens
  CDR3 for beta chain variable domain of TCR clone 395248 (TRBV7-3, TRBJ2-1)
CASSPTGGGEVEPFF

SEQ ID NO: 790497 - protein, 16 aa, Homo sapiens
  CDR3 for alpha chain variable domain of TCR clone 395249 (TRAV3, TRAJ21)
CAVRDIERGNFNKFYF

SEQ ID NO: 790498 - protein, 13 aa, Homo sapiens
  CDR3 for beta chain variable domain of TCR clone 395249 (TRBV27, TRBJ2-7)
CGSSLTTGYEQYF

SEQ ID NO: 790499 - protein, 15 aa, Homo sapiens
  CDR3 for alpha chain variable domain of TCR clone 395250 (TRAV12-2, TRAJ8)
CAVRVENTGFQKLVF

SEQ ID NO: 790500 - protein, 15 aa, Homo sapiens
  CDR3 for beta chain variable domain of TCR clone 395250 (TRBV28, TRBJ2-4)
CAAGSGTLLMGIQYF

SEQ ID NO: 790501 - protein, 14 aa, Homo sapiens
  CDR3 for alpha chain variable domain of TCR clone 395251 (TRAV20, TRAJ42)
CAVQARGSQGNLIF

SEQ ID NO: 790502 - protein, 15 aa, Homo sapiens
  CDR3 for beta chain variable domain of TCR clone 395251 (TRBV7-9, TRBJ1-6)
CASSSPGRGNSPLHF

SEQ ID NO: 790503 - protein, 13 aa, Homo sapiens
  CDR3 for alpha chain variable domain of TCR clone 395252 (TRAV30, TRAJ34)
CGKVGYNTDKLIF

SEQ ID NO: 790504 - protein, 16 aa, Homo sapiens
  CDR3 for beta chain variable domain of TCR clone 395252 (TRBV7-9, TRBJ1-2)
CASSLGFSSGEDGYTF

SEQ ID NO: 790505 - protein, 13 aa, Homo sapiens
  CDR3 for alpha chain variable domain of TCR clone 395253 (TRAV23/DV6, TRAJ34)
CAAIENNTDKLIF

SEQ ID NO: 790506 - protein, 18 aa, Homo sapiens
  CDR3 for beta chain variable domain of TCR clone 395253 (TRBV20-1, TRBJ2-6)
CSAETTPTQGSGANVLTF

SEQ ID NO: 790507 - protein, 15 aa, Homo sapiens
  CDR3 for alpha chain variable domain of TCR clone 395254 (TRAV12-1, TRAJ44)
CVADLPTGTASKLTF

SEQ ID NO: 790508 - protein, 14 aa, Homo sapiens
  CDR3 for beta chain variable domain of TCR clone 395254 (TRBV18, TRBJ1-2)
CASSPDRVVYGYTF

SEQ ID NO: 790509 - protein, 14 aa, Homo sapiens
  CDR3 for alpha chain variable domain of TCR clone 395255 (TRAV3, TRAJ34)
CALRDINNTDKLTF

SEQ ID NO: 790510 - protein, 14 aa, Homo sapiens
  CDR3 for beta chain variable domain of TCR clone 395255 (TRBV7-2, TRBJ2-2)
CASSLGQNTGELFF

SEQ ID NO: 790511 - protein, 12 aa, Homo sapiens
  CDR3 for alpha chain variable domain of TCR clone 395256 (TRAV21, TRAJ13)
PGPSGGYQKVTF

SEQ ID NO: 790512 - protein, 15 aa, Homo sapiens
  CDR3 for beta chain variable domain of TCR clone 395256 (TRBV7-9, TRBJ1-6)
CASSSLGRGNSPLHF

SEQ ID NO: 790513 - protein, 13 aa, Homo sapiens
  CDR3 for alpha chain variable domain of TCR clone 395257 (TRAV2, TRAJ15)
CAVASQAGTALIF

SEQ ID NO: 790514 - protein, 13 aa, Homo sapiens
  CDR3 for beta chain variable domain of TCR clone 395257 (TRBV18, TRBJ2-3)
CASSPGVTDTQYF

SEQ ID NO: 790515 - protein, 11 aa, Homo sapiens
  CDR3 for alpha chain variable domain of TCR clone 395258 (TRAV3, TRAJ21)
CAVGNFNKFYF

SEQ ID NO: 790516 - protein, 15 aa, Homo sapiens
  CDR3 for beta chain variable domain of TCR clone 395258 (TRBV19, TRBJ2-1)
ASSKAGPSSYNEQFF

SEQ ID NO: 790517 - protein, 21 aa, Homo sapiens
  CDR3 for alpha chain variable domain of TCR clone 395259 (TRAV36/DV7, TRAJ39)
TATQTGDSAIYLPNAGNMLTF

SEQ ID NO: 790518 - protein, 12 aa, Homo sapiens
  CDR3 for beta chain variable domain of TCR clone 395259 (TRBV12-4, TRBJ2-1)
CASSKDRRWQFF

SEQ ID NO: 790519 - protein, 18 aa, Homo sapiens
  CDR3 for alpha chain variable domain of TCR clone 395260 (TRAV26-2, TRAJ54)
CILRDVEVGIQGAQKRVF

SEQ ID NO: 790520 - protein, 16 aa, Homo sapiens
  CDR3 for beta chain variable domain of TCR clone 395260 (TRBV6-1, TRBJ2-5)
CASSETLDRGAETQYF

SEQ ID NO: 790521 - protein, 13 aa, Homo sapiens
  CDR3 for alpha chain variable domain of TCR clone 395261 (TRAV2, TRAJ40)
CAVATSGTYKYIF

SEQ ID NO: 790522 - protein, 14 aa, Homo sapiens
  CDR3 for beta chain variable domain of TCR clone 395261 (TRBV19, TRBJ2-1)
CASLTFVLSGEQFF

SEQ ID NO: 790523 - protein, 23 aa, Homo sapiens
  CDR3 for alpha chain variable domain of TCR clone 395262 (TRAV1-2, TRAJ8)
CAVRVPRGHRLSETCIWNWHPTS

SEQ ID NO: 790524 - protein, 16 aa, Homo sapiens
  CDR3 for beta chain variable domain of TCR clone 395262 (TRBV12-5, TRBJ2-5)
CASGPRTSGNQETQYF

SEQ ID NO: 790525 - protein, 15 aa, Homo sapiens
  CDR3 for alpha chain variable domain of TCR clone 395263 (TRAV8-3, TRAJ45)
CASSYSGGGADGLTF

SEQ ID NO: 790526 - protein, 16 aa, Homo sapiens
  CDR3 for beta chain variable domain of TCR clone 395263 (TRBV15, TRBJ1-2)
CATSRGPRTGGGGYTF

SEQ ID NO: 790527 - protein, 18 aa, Homo sapiens
  CDR3 for alpha chain variable domain of TCR clone 395264 (TRAV13-1, TRAJ52)
CAAKKPNAGGTSYGKLTF

SEQ ID NO: 790528 - protein, 15 aa, Homo sapiens
  CDR3 for beta chain variable domain of TCR clone 395264 (TRBV2, TRBJ2-1)
CASSEEREGDNEQFF

SEQ ID NO: 790529 - protein, 14 aa, Homo sapiens
  CDR3 for alpha chain variable domain of TCR clone 395265 (TRAV8-4, TRAJ54)
CAVSEGLGAQKLGF

SEQ ID NO: 790530 - protein, 15 aa, Homo sapiens
  CDR3 for beta chain variable domain of TCR clone 395265 (TRBV6-1, TRBJ2-6)
CASSSRPSGANVLTF

SEQ ID NO: 790531 - protein, 12 aa, Homo sapiens
  CDR3 for alpha chain variable domain of TCR clone 395266 (TRAV12-3, TRAJ17)
CAMTLTGNKLTF

SEQ ID NO: 790532 - protein, 15 aa, Homo sapiens
  CDR3 for beta chain variable domain of TCR clone 395266 (TRBV18, TRBJ2-7)
CASSPSSTGNYEQYF

SEQ ID NO: 790533 - protein, 14 aa, Homo sapiens
  CDR3 for alpha chain variable domain of TCR clone 395267 (TRAV27, TRAJ23)
CAGLSYNQGGKLIF

SEQ ID NO: 790534 - protein, 15 aa, Homo sapiens
  CDR3 for beta chain variable domain of TCR clone 395267 (TRBV20-1, TRBJ2-7)
CSARDRVSGMGEQYF

SEQ ID NO: 790535 - protein, 12 aa, Homo sapiens
  CDR3 for alpha chain variable domain of TCR clone 395268 (TRAV8-6, TRAJ57)
CAVQGGSEKLVF

SEQ ID NO: 790536 - protein, 14 aa, Homo sapiens
  CDR3 for beta chain variable domain of TCR clone 395268 (TRBV19, TRBJ2-1)
CASPTFVLSGEQFF

SEQ ID NO: 790537 - protein, 16 aa, Homo sapiens
  CDR3 for alpha chain variable domain of TCR clone 395269 (TRAV8-3, TRAJ10)
CAVGTGVTGGGNKLTF

SEQ ID NO: 790538 - protein, 13 aa, Homo sapiens
  CDR3 for beta chain variable domain of TCR clone 395269 (TRBV18, TRBJ1-1)
CASSPGPSGEAFF

SEQ ID NO: 790539 - protein, 14 aa, Homo sapiens
  CDR3 for alpha chain variable domain of TCR clone 395270 (TRAV2, TRAJ39)
CAVEGDNAGNMLTF

SEQ ID NO: 790540 - protein, 16 aa, Homo sapiens
  CDR3 for beta chain variable domain of TCR clone 395270 (TRBV19, TRBJ2-1)
CANSKAGPSSYNEQFF

SEQ ID NO: 790541 - protein, 16 aa, Homo sapiens
  CDR3 for alpha chain variable domain of TCR clone 395271 (TRAV21, TRAJ37)
CAVRPRGSSNTGKLIF

SEQ ID NO: 790542 - protein, 12 aa, Homo sapiens
  CDR3 for beta chain variable domain of TCR clone 395271 (TRBV5-1, TRBJ1-1)
CASSLTGAEAFF

SEQ ID NO: 790543 - protein, 11 aa, Homo sapiens
  CDR3 for alpha chain variable domain of TCR clone 395272 (TRAV3, TRAJ20)
CAVRDGYKLSF

SEQ ID NO: 790544 - protein, 14 aa, Homo sapiens
  CDR3 for beta chain variable domain of TCR clone 395272 (TRBV7-2, TRBJ2-7)
CASSPKTSFYEQYF

SEQ ID NO: 790545 - protein, 16 aa, Homo sapiens
  CDR3 for alpha chain variable domain of TCR clone 395273 (TRAV17, TRAJ28)
CASYAYSGAGSYQLTF

SEQ ID NO: 790546 - protein, 15 aa, Homo sapiens
  CDR3 for beta chain variable domain of TCR clone 395273 (TRBV4-2, TRBJ2-1)
CASSPSGGLYKEQFF

SEQ ID NO: 790547 - protein, 12 aa, Homo sapiens
  CDR3 for alpha chain variable domain of TCR clone 395274 (TRAV21, TRAJ49)
CAVRNTGNQFYF

SEQ ID NO: 790548 - protein, 16 aa, Homo sapiens
  CDR3 for beta chain variable domain of TCR clone 395274 (TRBV11-2, TRBJ1-1)
CASSLRQGGEHSKAFF

SEQ ID NO: 790549 - protein, 14 aa, Homo sapiens
  CDR3 for alpha chain variable domain of TCR clone 395275 (TRAV12-2, TRAJ13)
CAVKKTGGYQKVTF

SEQ ID NO: 790550 - protein, 16 aa, Homo sapiens
  CDR3 for beta chain variable domain of TCR clone 395275 (TRBV2, TRBJ2-1)
CASRSPAGGKYDEQFF

SEQ ID NO: 790551 - protein, 15 aa, Homo sapiens
  CDR3 for alpha chain variable domain of TCR clone 395276 (TRAV12-1, TRAJ10)
CVVNKLTVGGNKLTF

SEQ ID NO: 790552 - protein, 17 aa, Homo sapiens
  CDR3 for beta chain variable domain of TCR clone 395276 (TRBV5-1, TRBJ1-6)
CASSPSLQGSDNSPLHF

SEQ ID NO: 790553 - protein, 20 aa, Homo sapiens
  CDR3 for alpha chain variable domain of TCR clone 395277 (TRAV26-2, TRAJ29)
CILRDRSSTQRNSGNTPLVF

SEQ ID NO: 790554 - protein, 14 aa, Homo sapiens
  CDR3 for beta chain variable domain of TCR clone 395277 (TRBV25-1, TRBJ1-1)
CASTHLGGNTEAFF

SEQ ID NO: 790555 - protein, 13 aa, Homo sapiens
  CDR3 for alpha chain variable domain of TCR clone 395278 (TRAV21, TRAJ27)
CAARPGNAGKSTF

SEQ ID NO: 790556 - protein, 15 aa, Homo sapiens
  CDR3 for beta chain variable domain of TCR clone 395278 (TRBV29-1, TRBJ2-5)
CSVRLASGGGKTQYF

SEQ ID NO: 790557 - protein, 13 aa, Homo sapiens
  CDR3 for alpha chain variable domain of TCR clone 395279 (TRAV2, TRAJ40)
CAVVTSGTYKYIF

SEQ ID NO: 790558 - protein, 14 aa, Homo sapiens
  CDR3 for beta chain variable domain of TCR clone 395279 (TRBV19, TRBJ2-3)
CANSAPRGTDTQYF

SEQ ID NO: 790559 - protein, 12 aa, Homo sapiens
  CDR3 for alpha chain variable domain of TCR clone 395280 (TRAV20, TRAJ54)
CAVQEGAQKLVF

SEQ ID NO: 790560 - protein, 17 aa, Homo sapiens
  CDR3 for beta chain variable domain of TCR clone 395280 (TRBV13, TRBJ2-3)
RASSLSRVAGGRNTQYF

SEQ ID NO: 790561 - protein, 12 aa, Homo sapiens
  CDR3 for alpha chain variable domain of TCR clone 395281 (TRAV21, TRAJ39)
CAADNAGNMLTF

SEQ ID NO: 790562 - protein, 13 aa, Homo sapiens
  CDR3 for beta chain variable domain of TCR clone 395281 (TRBV12-4, TRBJ1-1)
CSSSPGTGFEAFF

SEQ ID NO: 790563 - protein, 11 aa, Homo sapiens
  CDR3 for alpha chain variable domain of TCR clone 395282 (TRAV2, TRAJ13)
CASGGYQQVTF

SEQ ID NO: 790564 - protein, 12 aa, Homo sapiens
  CDR3 for beta chain variable domain of TCR clone 395282 (TRBV5-1, TRBJ2-7)
CASSFRGYEQYF

SEQ ID NO: 790565 - protein, 11 aa, Homo sapiens
  CDR3 for alpha chain variable domain of TCR clone 395283 (TRAV27, TRAJ20)
CAGADDYKLSF

SEQ ID NO: 790566 - protein, 13 aa, Homo sapiens
  CDR3 for beta chain variable domain of TCR clone 395283 (TRBV20-1, TRBJ1-1)
CSARGGGNTEAFF

SEQ ID NO: 790567 - protein, 20 aa, Homo sapiens
  CDR3 for alpha chain variable domain of TCR clone 395284 (TRAV1-2, TRAJ34)
LLKELQMKDSASPNTDKLIF

SEQ ID NO: 790568 - protein, 12 aa, Homo sapiens
  CDR3 for beta chain variable domain of TCR clone 395284 (TRBV2, TRBJ2-1)
CAYGPPGNEQFF

SEQ ID NO: 790569 - protein, 11 aa, Homo sapiens
  CDR3 for alpha chain variable domain of TCR clone 395285 (TRAV12-1, TRAJ34)
CVVNKGGELIF

SEQ ID NO: 790570 - protein, 12 aa, Homo sapiens
  CDR3 for beta chain variable domain of TCR clone 395285 (TRBV2, TRBJ2-1)
CAYGPPGNERFF

SEQ ID NO: 790571 - protein, 11 aa, Homo sapiens
  CDR3 for alpha chain variable domain of TCR clone 395286 (TRAV17, TRAJ9)
CGFTGGFKTIC

SEQ ID NO: 790572 - protein, 14 aa, Homo sapiens
  CDR3 for beta chain variable domain of TCR clone 395286 (TRBV7-9, TRBJ2-2)
CASSLVPDTGELFF

SEQ ID NO: 790573 - protein, 12 aa, Homo sapiens
  CDR3 for alpha chain variable domain of TCR clone 395287 (TRAV1-2, TRAJ9)
CAGYTGGFKTIF

SEQ ID NO: 790574 - protein, 15 aa, Homo sapiens
  CDR3 for beta chain variable domain of TCR clone 395287 (TRBV11-2, TRBJ2-1)
CASSPSGQSLNEQFF

SEQ ID NO: 790575 - protein, 12 aa, Homo sapiens
  CDR3 for alpha chain variable domain of TCR clone 395288 (TRAV12-3, TRAJ17)
CAMTLTGNHLTF

SEQ ID NO: 790576 - protein, 15 aa, Homo sapiens
  CDR3 for beta chain variable domain of TCR clone 395288 (TRBV20-1, TRBJ2-7)
CSARDRVSGMDEQYF

SEQ ID NO: 790577 - protein, 17 aa, Homo sapiens
  CDR3 for alpha chain variable domain of TCR clone 395289 (TRAV14/DV4, TRAJ3)
CAMREGPGYSSASKIIF

SEQ ID NO: 790578 - protein, 17 aa, Homo sapiens
  CDR3 for beta chain variable domain of TCR clone 395289 (TRBV20-1, TRBJ1-5)
CSARVGGERQGNQPQHF

SEQ ID NO: 790579 - protein, 11 aa, Homo sapiens
  CDR3 for alpha chain variable domain of TCR clone 395290 (TRAV23/DV6, TRAJ58)
CAARLLRGETS

SEQ ID NO: 790580 - protein, 15 aa, Homo sapiens
  CDR3 for beta chain variable domain of TCR clone 395290 (TRBV7-2, TRBJ2-1)
CASSLASGRVNEQFF

SEQ ID NO: 790581 - protein, 16 aa, Homo sapiens
  CDR3 for alpha chain variable domain of TCR clone 395291 (TRAV3, TRAJ10)
CAVRDMRAGGGNKLTF

SEQ ID NO: 790582 - protein, 20 aa, Homo sapiens
  CDR3 for beta chain variable domain of TCR clone 395291 (TRBV11-3, TRBJ2-7)
CASSQRTSGCLRAVLRAGHQ

SEQ ID NO: 790583 - protein, 17 aa, Homo sapiens
  CDR3 for alpha chain variable domain of TCR clone 395292 (TRAV4, TRAJ42)
CLMGVLNYGGSQGNLIF

SEQ ID NO: 790584 - protein, 12 aa, Homo sapiens
  CDR3 for beta chain variable domain of TCR clone 395292 (TRBV20-1, TRBJ2-1)
CSAQYTYNEQFL

SEQ ID NO: 790585 - protein, 14 aa, Homo sapiens
  CDR3 for alpha chain variable domain of TCR clone 395293 (TRAV13-1, TRAJ16)
CAAAYFFRWPEAAL

SEQ ID NO: 790586 - protein, 14 aa, Homo sapiens
  CDR3 for beta chain variable domain of TCR clone 395293 (TRBV12-4, TRBJ2-6)
CASSGGAGANVLTF

SEQ ID NO: 790587 - protein, 14 aa, Homo sapiens
  CDR3 for alpha chain variable domain of TCR clone 395294 (TRAV21, TRAJ10)
CAVALTGGGNKLTF

SEQ ID NO: 790588 - protein, 14 aa, Homo sapiens
  CDR3 for beta chain variable domain of TCR clone 395294 (TRBV12-4, TRBJ1-1)
CASSLGTGGTEAFF

SEQ ID NO: 790589 - protein, 13 aa, Homo sapiens
  CDR3 for alpha chain variable domain of TCR clone 395295 (TRAV20, TRAJ49)
CAVQARTGNQFYF

SEQ ID NO: 790590 - protein, 13 aa, Homo sapiens
  CDR3 for beta chain variable domain of TCR clone 395295 (TRBV28, TRBJ2-1)
CQQFKREKHEQFF

SEQ ID NO: 790591 - protein, 14 aa, Homo sapiens
  CDR3 for alpha chain variable domain of TCR clone 395296 (TRAV2, TRAJ9)
CAVADRSGGFKTIF

SEQ ID NO: 790592 - protein, 14 aa, Homo sapiens
  CDR3 for beta chain variable domain of TCR clone 395296 (TRBV4-1, TRBJ2-2)
CASSQAVNTGELFF

SEQ ID NO: 790593 - protein, 14 aa, Homo sapiens
  CDR3 for alpha chain variable domain of TCR clone 395297 (TRAV8-3, TRAJ4)
CAVGAAGGYNKLIF

SEQ ID NO: 790594 - protein, 16 aa, Homo sapiens
  CDR3 for beta chain variable domain of TCR clone 395297 (TRBV13, TRBJ2-2)
CASSPRKGEHTGELFF

SEQ ID NO: 790595 - protein, 14 aa, Homo sapiens
  CDR3 for alpha chain variable domain of TCR clone 395298 (TRAV35, TRAJ40)
CAGSTTSGTYKYIF

SEQ ID NO: 790596 - protein, 13 aa, Homo sapiens
  CDR3 for beta chain variable domain of TCR clone 395298 (TRBV6-1, TRBJ1-1)
CASSRQGNTEAFF

SEQ ID NO: 790597 - protein, 17 aa, Homo sapiens
  CDR3 for alpha chain variable domain of TCR clone 395299 (TRAV3, TRAJ28)
CAVREAYSGAGSYQLTF

SEQ ID NO: 790598 - protein, 13 aa, Homo sapiens
  CDR3 for beta chain variable domain of TCR clone 395299 (TRBV19, TRBJ1-2)
CASSVPGQDGYTF

SEQ ID NO: 790599 - protein, 14 aa, Homo sapiens
  CDR3 for alpha chain variable domain of TCR clone 395300 (TRAV38-1, TRAJ29)
CAFITPSGYTPLVF

SEQ ID NO: 790600 - protein, 14 aa, Homo sapiens
  CDR3 for beta chain variable domain of TCR clone 395300 (TRBV18, TRBJ2-7)
CASSPRGGAYEQYF

SEQ ID NO: 790601 - protein, 11 aa, Homo sapiens
  CDR3 for alpha chain variable domain of TCR clone 395301 (TRAV17, TRAJ9)
CGFTGGFKTIF

SEQ ID NO: 790602 - protein, 17 aa, Homo sapiens
  CDR3 for beta chain variable domain of TCR clone 395301 (TRBV20-1, TRBJ2-1)
CSAPPRLAGTRYNEQFF

SEQ ID NO: 790603 - protein, 13 aa, Homo sapiens
  CDR3 for alpha chain variable domain of TCR clone 395302 (TRAV29/DV5, TRAJ31)
CAASRNNNARLMF

SEQ ID NO: 790604 - protein, 13 aa, Homo sapiens
  CDR3 for beta chain variable domain of TCR clone 395302 (TRBV18, TRBJ1-1)
CASSPNGDTEAFF

SEQ ID NO: 790605 - protein, 18 aa, Homo sapiens
  CDR3 for alpha chain variable domain of TCR clone 395303 (TRAV21, TRAJ53)
CAVKGGENSGGSNYKLTF

SEQ ID NO: 790606 - protein, 18 aa, Homo sapiens
  CDR3 for beta chain variable domain of TCR clone 395303 (TRBV4-3, TRBJ1-6)
CASSQETPASSYNSPLHF

SEQ ID NO: 790607 - protein, 11 aa, Homo sapiens
  CDR3 for alpha chain variable domain of TCR clone 395304 (TRAV13-1, TRAJ43)
CAAHNNNDMRF

SEQ ID NO: 790608 - protein, 15 aa, Homo sapiens
  CDR3 for beta chain variable domain of TCR clone 395304 (TRBV6-1, TRBJ2-2)
CASSRLRGDTGELFF

SEQ ID NO: 790609 - protein, 14 aa, Homo sapiens
  CDR3 for alpha chain variable domain of TCR clone 395305 (TRAV13-2, TRAJ15)
YAENTNQAGTALIF

SEQ ID NO: 790610 - protein, 16 aa, Homo sapiens
  CDR3 for beta chain variable domain of TCR clone 395305 (TRBV12-4, TRBJ1-2)
CASSPTATGKTRGYTF

SEQ ID NO: 790611 - protein, 16 aa, Homo sapiens
  CDR3 for alpha chain variable domain of TCR clone 395306 (TRAV21, TRAJ37)
CAVRTAGSSNTGKLIF

SEQ ID NO: 790612 - protein, 17 aa, Homo sapiens
  CDR3 for beta chain variable domain of TCR clone 395306 (TRBV7-9, TRBJ2-5)
CASLPSGRETVLRARHA

SEQ ID NO: 790613 - protein, 12 aa, Homo sapiens
  CDR3 for alpha chain variable domain of TCR clone 395307 (TRAV1-1, TRAJ8)
CAGGTGFQKLVF

SEQ ID NO: 790614 - protein, 14 aa, Homo sapiens
  CDR3 for beta chain variable domain of TCR clone 395307 (TRBV7-9, TRBJ2-3)
CASSLEDGTDTQYF

SEQ ID NO: 790615 - protein, 14 aa, Homo sapiens
  CDR3 for alpha chain variable domain of TCR clone 395308 (TRAV35, TRAJ33)
CAGSSQDSNYQLIW

SEQ ID NO: 790616 - protein, 14 aa, Homo sapiens
  CDR3 for beta chain variable domain of TCR clone 395308 (TRBV11-2, TRBJ2-5)
CASSRTGGIETQYF

SEQ ID NO: 790617 - protein, 12 aa, Homo sapiens
  CDR3 for alpha chain variable domain of TCR clone 395309 (TRAV12-3, TRAJ20)
CAMVRGDYKLSF

SEQ ID NO: 790618 - protein, 12 aa, Homo sapiens
  CDR3 for beta chain variable domain of TCR clone 395309 (TRBV6-1, TRBJ2-7)
CAGSDYSYEQYF

SEQ ID NO: 790619 - protein, 16 aa, Homo sapiens
  CDR3 for alpha chain variable domain of TCR clone 395310 (TRAV12-3, TRAJ53)
CAMSPGGGGSNYKLTF

SEQ ID NO: 790620 - protein, 15 aa, Homo sapiens
  CDR3 for beta chain variable domain of TCR clone 395310 (TRBV4-1, TRBJ1-4)
CASSDTGGTNEKLFF

SEQ ID NO: 790621 - protein, 15 aa, Homo sapiens
  CDR3 for alpha chain variable domain of TCR clone 395311 (TRAV26-1, TRAJ44)
CIVKIGTGTASKLTF

SEQ ID NO: 790622 - protein, 15 aa, Homo sapiens
  CDR3 for beta chain variable domain of TCR clone 395311 (TRBV7-6, TRBJ2-1)
CAGSSLAGEGNEQLF

SEQ ID NO: 790623 - protein, 13 aa, Homo sapiens
  CDR3 for alpha chain variable domain of TCR clone 395312 (TRAV26-1, TRAJ40)
CIVRVEGTYKYIF

SEQ ID NO: 790624 - protein, 15 aa, Homo sapiens
  CDR3 for beta chain variable domain of TCR clone 395312 (TRBV7-6, TRBJ2-7)
CASSGRRDTFGEQYF

SEQ ID NO: 790625 - protein, 14 aa, Homo sapiens
  CDR3 for alpha chain variable domain of TCR clone 395313 (TRAV13-1, TRAJ44)
CAAKATGTASKLTF

SEQ ID NO: 790626 - protein, 13 aa, Homo sapiens
  CDR3 for beta chain variable domain of TCR clone 395313 (TRBV2, TRBJ1-1)
CASRWTVNTEAFF

SEQ ID NO: 790627 - protein, 11 aa, Homo sapiens
  CDR3 for alpha chain variable domain of TCR clone 395314 (TRAV12-3, TRAJ27)
CAMANAGKSTF

SEQ ID NO: 790628 - protein, 12 aa, Homo sapiens
  CDR3 for beta chain variable domain of TCR clone 395314 (TRBV11-2, TRBJ2-1)
CASSPGNNEQFF

SEQ ID NO: 790629 - protein, 13 aa, Homo sapiens
  CDR3 for alpha chain variable domain of TCR clone 395315 (TRAV2, TRAJ40)
CVVVTSGTYKYIF

SEQ ID NO: 790630 - protein, 16 aa, Homo sapiens
  CDR3 for beta chain variable domain of TCR clone 395315 (TRBV19, TRBJ2-2)
CASRSPGTGATGELFF

SEQ ID NO: 790631 - protein, 14 aa, Homo sapiens
  CDR3 for alpha chain variable domain of TCR clone 395316 (TRAV13-1, TRAJ44)
CAAKATGTASKLTF

SEQ ID NO: 790632 - protein, 14 aa, Homo sapiens
  CDR3 for beta chain variable domain of TCR clone 395316 (TRBV11-2, TRBJ2-1)
CASSLEVANNEQFF

SEQ ID NO: 790633 - protein, 12 aa, Homo sapiens
  CDR3 for alpha chain variable domain of TCR clone 395317 (TRAV21, TRAJ33)
CAKMDSNYQLIC

SEQ ID NO: 790634 - protein, 14 aa, Homo sapiens
  CDR3 for beta chain variable domain of TCR clone 395317 (TRBV2, TRBJ2-7)
CASSLASGGYEQYF

SEQ ID NO: 790635 - protein, 13 aa, Homo sapiens
  CDR3 for alpha chain variable domain of TCR clone 395318 (TRAV2, TRAJ40)
CAVFTSGTYKYIF

SEQ ID NO: 790636 - protein, 14 aa, Homo sapiens
  CDR3 for beta chain variable domain of TCR clone 395318 (TRBV2, TRBJ1-1)
CASTQVGENTEAFF

SEQ ID NO: 790637 - protein, 15 aa, Homo sapiens
  CDR3 for alpha chain variable domain of TCR clone 395319 (TRAV26-1, TRAJ29)
CIFRVEGSGNTPLVF

SEQ ID NO: 790638 - protein, 15 aa, Homo sapiens
  CDR3 for beta chain variable domain of TCR clone 395319 (TRBV7-9, TRBJ1-5)
CASSQGHQPNQPQHF

SEQ ID NO: 790639 - protein, 12 aa, Homo sapiens
  CDR3 for alpha chain variable domain of TCR clone 395320 (TRAV8-3, TRAJ26)
CAGDNYGQNFVF

SEQ ID NO: 790640 - protein, 15 aa, Homo sapiens
  CDR3 for beta chain variable domain of TCR clone 395320 (TRBV6-6, TRBJ2-7)
CASSYSYGGSYEQYF

SEQ ID NO: 790641 - protein, 12 aa, Homo sapiens
  CDR3 for alpha chain variable domain of TCR clone 395321 (TRAV12-2, TRAJ10)
WGVTGGGNKHTF

SEQ ID NO: 790642 - protein, 16 aa, Homo sapiens
  CDR3 for beta chain variable domain of TCR clone 395321 (TRBV6-4, TRBJ1-2)
CASSEAVGDPNYGYTF

SEQ ID NO: 790643 - protein, 16 aa, Homo sapiens
  CDR3 for alpha chain variable domain of TCR clone 395322 (TRAV4, TRAJ18)
CCVLLIGGSTLGRLYF

SEQ ID NO: 790644 - protein, 12 aa, Homo sapiens
  CDR3 for beta chain variable domain of TCR clone 395322 (TRBV6-3, TRBJ2-7)
CASSLTPDEQYV

SEQ ID NO: 790645 - protein, 14 aa, Homo sapiens
  CDR3 for alpha chain variable domain of TCR clone 395323 (TRAV16, TRAJ17)
CALSGRAAGNKLTF

SEQ ID NO: 790646 - protein, 13 aa, Homo sapiens
  CDR3 for beta chain variable domain of TCR clone 395323 (TRBV7-9, TRBJ1-2)
CASSLKQNYGYTF

SEQ ID NO: 790647 - protein, 14 aa, Homo sapiens
  CDR3 for alpha chain variable domain of TCR clone 395324 (TRAV12-2, TRAJ24)
CAVTPADSWGKLQF

SEQ ID NO: 790648 - protein, 14 aa, Homo sapiens
  CDR3 for beta chain variable domain of TCR clone 395324 (TRBV7-3, TRBJ1-1)
CASSLGTGYTEAFF

SEQ ID NO: 790649 - protein, 16 aa, Homo sapiens
  CDR3 for alpha chain variable domain of TCR clone 395325 (TRAV30, TRAJ49)
SAAQRVGPNTGNQFYF

SEQ ID NO: 790650 - protein, 15 aa, Homo sapiens
  CDR3 for beta chain variable domain of TCR clone 395325 (TRBV7-3, TRBJ2-2)
CASSETGQGTGELFF

SEQ ID NO: 790651 - protein, 12 aa, Homo sapiens
  CDR3 for alpha chain variable domain of TCR clone 395326 (TRAV2, TRAJ9)
CAVGAGGFKTIF

SEQ ID NO: 790652 - protein, 16 aa, Homo sapiens
  CDR3 for beta chain variable domain of TCR clone 395326 (TRBV13, TRBJ2-2)
CASSPRTGEHTGDLFF

SEQ ID NO: 790653 - protein, 11 aa, Homo sapiens
  CDR3 for alpha chain variable domain of TCR clone 395327 (TRAV3, TRAJ21)
CAVGNFNKFYF

SEQ ID NO: 790654 - protein, 16 aa, Homo sapiens
  CDR3 for beta chain variable domain of TCR clone 395327 (TRBV19, TRBJ2-1)
CDSGKAGPSSYNEQFF

SEQ ID NO: 790655 - protein, 13 aa, Homo sapiens
  CDR3 for alpha chain variable domain of TCR clone 395328 (TRAV3, TRAJ20)
CCEAFCNDYKLSF

SEQ ID NO: 790656 - protein, 15 aa, Homo sapiens
  CDR3 for beta chain variable domain of TCR clone 395328 (TRBV6-5, TRBJ2-1)
CASSHDAGAGNEQFF

SEQ ID NO: 790657 - protein, 22 aa, Homo sapiens
  CDR3 for alpha chain variable domain of TCR clone 395329 (TRAV8-2, TRAJ45)
HLTKPSAHMSDAAEYSADGLTF

SEQ ID NO: 790658 - protein, 16 aa, Homo sapiens
  CDR3 for beta chain variable domain of TCR clone 395329 (TRBV2, TRBJ2-1)
CASSVGGSLSYNEQFF

SEQ ID NO: 790659 - protein, 15 aa, Homo sapiens
  CDR3 for alpha chain variable domain of TCR clone 395330 (TRAV12-2, TRAJ53)
CAVNGGGGSNYKLTF

SEQ ID NO: 790660 - protein, 16 aa, Homo sapiens
  CDR3 for beta chain variable domain of TCR clone 395330 (TRBV7-2, TRBJ2-1)
CASSLVGGPELNEQFF

SEQ ID NO: 790661 - protein, 12 aa, Homo sapiens
  CDR3 for alpha chain variable domain of TCR clone 395331 (TRAV35, TRAJ49)
CAGWNTGNQFYF

SEQ ID NO: 790662 - protein, 16 aa, Homo sapiens
  CDR3 for beta chain variable domain of TCR clone 395331 (TRBV5-1, TRBJ2-2)
CASSLWDTTNTGELLF

SEQ ID NO: 790663 - protein, 15 aa, Homo sapiens
  CDR3 for alpha chain variable domain of TCR clone 395332 (TRAV3, TRAJ22)
CAVRDRGGSARQTTF

SEQ ID NO: 790664 - protein, 14 aa, Homo sapiens
  CDR3 for beta chain variable domain of TCR clone 395332 (TRBV19, TRBJ1-5)
CASSLGLIGQPQHF

SEQ ID NO: 790665 - protein, 15 aa, Homo sapiens
  CDR3 for alpha chain variable domain of TCR clone 395333 (TRAV26-1, TRAJ29)
CIVRVEGSGNTPLVF

SEQ ID NO: 790666 - protein, 15 aa, Homo sapiens
  CDR3 for beta chain variable domain of TCR clone 395333 (TRBV12-4, TRBJ1-1)
CQQQDRVEANTESFF

SEQ ID NO: 790667 - protein, 16 aa, Homo sapiens
  CDR3 for alpha chain variable domain of TCR clone 395334 (TRAV1-2, TRAJ10)
CAVRGVLTGGGNKITF

SEQ ID NO: 790668 - protein, 15 aa, Homo sapiens
  CDR3 for beta chain variable domain of TCR clone 395334 (TRBV7-9, TRBJ1-6)
CASSSPGRGNSPLHF

SEQ ID NO: 790669 - protein, 15 aa, Homo sapiens
  CDR3 for alpha chain variable domain of TCR clone 395335 (TRAV26-1, TRAJ44)
CIVRANTGTASKLTF

SEQ ID NO: 790670 - protein, 16 aa, Homo sapiens
  CDR3 for beta chain variable domain of TCR clone 395335 (TRBV7-7, TRBJ2-1)
CVSSLASGTSYNEQFF

SEQ ID NO: 790671 - protein, 12 aa, Homo sapiens
  CDR3 for alpha chain variable domain of TCR clone 395336 (TRAV12-3, TRAJ5)
CAMDTGRRALTF

SEQ ID NO: 790672 - protein, 13 aa, Homo sapiens
  CDR3 for beta chain variable domain of TCR clone 395336 (TRBV7-7, TRBJ2-2)
CASRLTSAGELFF

SEQ ID NO: 790673 - protein, 13 aa, Homo sapiens
  CDR3 for alpha chain variable domain of TCR clone 395337 (TRAV2, TRAJ15)
CAVASQAGTALIF

SEQ ID NO: 790674 - protein, 18 aa, Homo sapiens
  CDR3 for beta chain variable domain of TCR clone 395337 (TRBV18, TRBJ1-3)
CASSPRGGAGPSGNTIYF

SEQ ID NO: 790675 - protein, 15 aa, Homo sapiens
  CDR3 for alpha chain variable domain of TCR clone 395338 (TRAV12-3, TRAJ11)
CAMSEENSGYSTPTF

SEQ ID NO: 790676 - protein, 13 aa, Homo sapiens
  CDR3 for beta chain variable domain of TCR clone 395338 (TRBV12-4, TRBJ2-1)
CASSFHSGSEQFF

SEQ ID NO: 790677 - protein, 14 aa, Homo sapiens
  CDR3 for alpha chain variable domain of TCR clone 395339 (TRAV17, TRAJ38)
CATGSAGNNRKLIW

SEQ ID NO: 790678 - protein, 12 aa, Homo sapiens
  CDR3 for beta chain variable domain of TCR clone 395339 (TRBV5-1, TRBJ2-5)
CASSFSWETQYF

SEQ ID NO: 790679 - protein, 13 aa, Homo sapiens
  CDR3 for alpha chain variable domain of TCR clone 395340 (TRAV12-3, TRAJ56)
CALATGANSKLTF

SEQ ID NO: 790680 - protein, 13 aa, Homo sapiens
  CDR3 for beta chain variable domain of TCR clone 395340 (TRBV4-1, TRBJ2-2)
CASSQENTGELFF

SEQ ID NO: 790681 - protein, 20 aa, Homo sapiens
  CDR3 for alpha chain variable domain of TCR clone 395341 (TRAV8-3, )
CAVGAGDIQNPDPAVYPLRD

SEQ ID NO: 790682 - protein, 14 aa, Homo sapiens
  CDR3 for beta chain variable domain of TCR clone 395341 (TRBV5-1, TRBJ1-5)
CASSLGQGAQPQHF

SEQ ID NO: 790683 - protein, 16 aa, Homo sapiens
  CDR3 for alpha chain variable domain of TCR clone 395342 (TRAV27, TRAJ52)
CAGAPAGGNIYGKLTF

SEQ ID NO: 790684 - protein, 12 aa, Homo sapiens
  CDR3 for beta chain variable domain of TCR clone 395342 (TRBV27, TRBJ2-1)
CASRGFYNEQFF

SEQ ID NO: 790685 - protein, 10 aa, Homo sapiens
  CDR3 for alpha chain variable domain of TCR clone 395343 (TRAV26-1, )
CIVSHRVEVF

SEQ ID NO: 790686 - protein, 14 aa, Homo sapiens
  CDR3 for beta chain variable domain of TCR clone 395343 (TRBV20-1, TRBJ2-7)
CSAWTALISYEQYF

SEQ ID NO: 790687 - protein, 14 aa, Homo sapiens
  CDR3 for alpha chain variable domain of TCR clone 395344 (TRAV8-3, TRAJ39)
CAVGANNAGNILTF

SEQ ID NO: 790688 - protein, 14 aa, Homo sapiens
  CDR3 for beta chain variable domain of TCR clone 395344 (TRBV2, TRBJ1-5)
CASSGTVSNQPQHF

SEQ ID NO: 790689 - protein, 13 aa, Homo sapiens
  CDR3 for alpha chain variable domain of TCR clone 395345 (TRAV13-1, TRAJ41)
CADAPNSGYALHF

SEQ ID NO: 790690 - protein, 13 aa, Homo sapiens
  CDR3 for beta chain variable domain of TCR clone 395345 (TRBV19, TRBJ2-7)
CASEGTTTYEQYF

SEQ ID NO: 790691 - protein, 15 aa, Homo sapiens
  CDR3 for alpha chain variable domain of TCR clone 395346 (TRAV26-2, TRAJ50)
CILRDEETSYDKVIF

SEQ ID NO: 790692 - protein, 17 aa, Homo sapiens
  CDR3 for beta chain variable domain of TCR clone 395346 (TRBV5-7, TRBJ1-6)
CASSLAPGDTYKSPLHF

SEQ ID NO: 790693 - protein, 16 aa, Homo sapiens
  CDR3 for alpha chain variable domain of TCR clone 395347 (TRAV30, TRAJ24)
CGTEIVAADSWGKFQF

SEQ ID NO: 790694 - protein, 14 aa, Homo sapiens
  CDR3 for beta chain variable domain of TCR clone 395347 (TRBV12-5, TRBJ2-5)
CASGSRTHQETQYL

SEQ ID NO: 790695 - protein, 15 aa, Homo sapiens
  CDR3 for alpha chain variable domain of TCR clone 395348 (TRAV26-1, TRAJ22)
CIVRVSFWFCKATDL

SEQ ID NO: 790696 - protein, 12 aa, Homo sapiens
  CDR3 for beta chain variable domain of TCR clone 395348 (TRBV29-1, TRBJ2-3)
CSVTGGADTQYF

SEQ ID NO: 790697 - protein, 14 aa, Homo sapiens
  CDR3 for alpha chain variable domain of TCR clone 395349 (TRAV35, TRAJ38)
CAGSNAGNNRKLMW

SEQ ID NO: 790698 - protein, 12 aa, Homo sapiens
  CDR3 for beta chain variable domain of TCR clone 395349 (TRBV19, TRBJ2-7)
CASTDRGYEQYF

SEQ ID NO: 790699 - protein, 16 aa, Homo sapiens
  CDR3 for alpha chain variable domain of TCR clone 395350 (TRAV1-2, TRAJ18)
CAVRVERGSTLGRLYF

SEQ ID NO: 790700 - protein, 16 aa, Homo sapiens
  CDR3 for beta chain variable domain of TCR clone 395350 (TRBV20-1, TRBJ2-7)
CSASTSGRLSSYERYF

SEQ ID NO: 790701 - protein, 13 aa, Homo sapiens
  CDR3 for alpha chain variable domain of TCR clone 395351 (TRAV2, TRAJ13)
CAVESGGYQKVTF

SEQ ID NO: 790702 - protein, 10 aa, Homo sapiens
  CDR3 for beta chain variable domain of TCR clone 395351 (TRBV29-1, TRBJ2-3)
VAGGRNTQYF

SEQ ID NO: 790703 - protein, 14 aa, Homo sapiens
  CDR3 for alpha chain variable domain of TCR clone 395352 (TRAV13-1, TRAJ35)
CAASKGGFGNVLHC

SEQ ID NO: 790704 - protein, 13 aa, Homo sapiens
  CDR3 for beta chain variable domain of TCR clone 395352 (TRBV7-3, TRBJ1-1)
CDSSQDWGAEASF

SEQ ID NO: 790705 - protein, 11 aa, Homo sapiens
  CDR3 for alpha chain variable domain of TCR clone 395353 (TRAV8-4, TRAJ34)
CAGSWTYKLIF

SEQ ID NO: 790706 - protein, 14 aa, Homo sapiens
  CDR3 for beta chain variable domain of TCR clone 395353 (TRBV7-9, TRBJ2-3)
CASSLEDGTDTQYF

SEQ ID NO: 790707 - protein, 18 aa, Homo sapiens
  CDR3 for alpha chain variable domain of TCR clone 395354 (TRAV29/DV5, TRAJ52)
CAAGFRGAGGNSYGKLTF

SEQ ID NO: 790708 - protein, 16 aa, Homo sapiens
  CDR3 for beta chain variable domain of TCR clone 395354 (TRBV7-3, TRBJ2-2)
CASSLKRGTLSGELFF

SEQ ID NO: 790709 - protein, 13 aa, Homo sapiens
  CDR3 for alpha chain variable domain of TCR clone 395355 (TRAV2, TRAJ40)
CAVITSGTYKYIF

SEQ ID NO: 790710 - protein, 14 aa, Homo sapiens
  CDR3 for beta chain variable domain of TCR clone 395355 (TRBV19, TRBJ2-1)
CASLTFVLSGEQFF

SEQ ID NO: 790711 - protein, 12 aa, Homo sapiens
  CDR3 for alpha chain variable domain of TCR clone 395356 (TRAV13-2, TRAJ23)
CAERHRGGKLLF

SEQ ID NO: 790712 - protein, 15 aa, Homo sapiens
  CDR3 for beta chain variable domain of TCR clone 395356 (TRBV6-3, TRBJ2-7)
CASSSPGTVFYEQYF

SEQ ID NO: 790713 - protein, 16 aa, Homo sapiens
  CDR3 for alpha chain variable domain of TCR clone 395357 (TRAV30, TRAJ24)
RVTEIVDADSWGKFQF

SEQ ID NO: 790714 - protein, 14 aa, Homo sapiens
  CDR3 for beta chain variable domain of TCR clone 395357 (TRBV12-5, TRBJ2-5)
CASGSRTHQETQYF

SEQ ID NO: 790715 - protein, 13 aa, Homo sapiens
  CDR3 for alpha chain variable domain of TCR clone 395358 (TRAV16, TRAJ34)
CALSPYNTDKLIF

SEQ ID NO: 790716 - protein, 17 aa, Homo sapiens
  CDR3 for beta chain variable domain of TCR clone 395358 (TRBV5-1, TRBJ2-1)
CASSTGTIGYSYNEQFF

SEQ ID NO: 790717 - protein, 14 aa, Homo sapiens
  CDR3 for alpha chain variable domain of TCR clone 395359 (TRAV20, TRAJ29)
CAMQAWVGNTPLVF

SEQ ID NO: 790718 - protein, 15 aa, Homo sapiens
  CDR3 for beta chain variable domain of TCR clone 395359 (TRBV29-1, TRBJ2-7)
CSVEFFDRGSYEQYF

SEQ ID NO: 790719 - protein, 11 aa, Homo sapiens
  CDR3 for alpha chain variable domain of TCR clone 395360 (TRAV3, TRAJ21)
CAVGNFNKFHF

SEQ ID NO: 790720 - protein, 16 aa, Homo sapiens
  CDR3 for beta chain variable domain of TCR clone 395360 (TRBV19, TRBJ2-1)
CASSKAGPSYYNEQFF

SEQ ID NO: 790721 - protein, 15 aa, Homo sapiens
  CDR3 for alpha chain variable domain of TCR clone 395361 (TRAV36/DV7, TRAJ53)
CAVEGSGGSNYKLTF

SEQ ID NO: 790722 - protein, 13 aa, Homo sapiens
  CDR3 for beta chain variable domain of TCR clone 395361 (TRBV4-1, TRBJ2-7)
CASSQGQAYEQYF

SEQ ID NO: 790723 - protein, 13 aa, Homo sapiens
  CDR3 for alpha chain variable domain of TCR clone 395362 (TRAV12-3, TRAJ33)
CAMSVNSNYQLIW

SEQ ID NO: 790724 - protein, 15 aa, Homo sapiens
  CDR3 for beta chain variable domain of TCR clone 395362 (TRBV7-2, TRBJ1-2)
CASSLAPDRGLGYTF

SEQ ID NO: 790725 - protein, 12 aa, Homo sapiens
  CDR3 for alpha chain variable domain of TCR clone 395363 (TRAV12-3, TRAJ17)
FAMTLTGNKLTF

SEQ ID NO: 790726 - protein, 15 aa, Homo sapiens
  CDR3 for beta chain variable domain of TCR clone 395363 (TRBV20-1, TRBJ2-7)
CSARDRVSGVDEQYF

SEQ ID NO: 790727 - protein, 16 aa, Homo sapiens
  CDR3 for alpha chain variable domain of TCR clone 395364 (TRAV36/DV7, TRAJ30)
CAVETSGLDRDDKIIF

SEQ ID NO: 790728 - protein, 13 aa, Homo sapiens
  CDR3 for beta chain variable domain of TCR clone 395364 (TRBV7-9, TRBJ2-3)
CASSPGSTDTQYF

SEQ ID NO: 790729 - protein, 16 aa, Homo sapiens
  CDR3 for alpha chain variable domain of TCR clone 395365 (TRAV12-3, TRAJ53)
CPVSPGSGGSNYKLTF

SEQ ID NO: 790730 - protein, 11 aa, Homo sapiens
  CDR3 for beta chain variable domain of TCR clone 395365 (TRBV29-1, TRBJ2-5)
CSEDRTGTQYF

SEQ ID NO: 790731 - protein, 13 aa, Homo sapiens
  CDR3 for alpha chain variable domain of TCR clone 395366 (TRAV21, TRAJ32)
CAVSGGATNKLIF

SEQ ID NO: 790732 - protein, 13 aa, Homo sapiens
  CDR3 for beta chain variable domain of TCR clone 395366 (TRBV23-1, TRBJ2-1)
CASSQWPQLTMSS

SEQ ID NO: 790733 - protein, 14 aa, Homo sapiens
  CDR3 for alpha chain variable domain of TCR clone 395367 (TRAV13-1, TRAJ9)
CAASALTGGFKTIF

SEQ ID NO: 790734 - protein, 16 aa, Homo sapiens
  CDR3 for beta chain variable domain of TCR clone 395367 (TRBV7-8, TRBJ2-4)
CASSAERTLANNMQYF

SEQ ID NO: 790735 - protein, 15 aa, Homo sapiens
  CDR3 for alpha chain variable domain of TCR clone 395368 (TRAV21, TRAJ22)
CAVRLFFWFCKATDL

SEQ ID NO: 790736 - protein, 15 aa, Homo sapiens
  CDR3 for beta chain variable domain of TCR clone 395368 (TRBV7-3, TRBJ2-1)
CASSPTGGGEVEQFF

SEQ ID NO: 790737 - protein, 15 aa, Homo sapiens
  CDR3 for alpha chain variable domain of TCR clone 395369 (TRAV35, TRAJ33)
CAGQPPRYSNYQLIW

SEQ ID NO: 790738 - protein, 15 aa, Homo sapiens
  CDR3 for beta chain variable domain of TCR clone 395369 (TRBV9, TRBJ1-6)
CASSVAGTGDSPLHF

SEQ ID NO: 790739 - protein, 12 aa, Homo sapiens
  CDR3 for alpha chain variable domain of TCR clone 395370 (TRAV16, TRAJ10)
CSRIGGGNKLTF

SEQ ID NO: 790740 - protein, 15 aa, Homo sapiens
  CDR3 for beta chain variable domain of TCR clone 395370 (TRBV6-3, TRBJ2-7)
CASSSPGTVFYEQYF

SEQ ID NO: 790741 - protein, 14 aa, Homo sapiens
  CDR3 for alpha chain variable domain of TCR clone 395371 (TRAV13-1, TRAJ35)
CAASEGGFGNVLHC

SEQ ID NO: 790742 - protein, 15 aa, Homo sapiens
  CDR3 for beta chain variable domain of TCR clone 395371 (TRBV28, TRBJ2-1)
CASSGLAEVDNEQFF

SEQ ID NO: 790743 - protein, 15 aa, Homo sapiens
  CDR3 for alpha chain variable domain of TCR clone 395372 (TRAV3, TRAJ5)
CAVRYLDTGRRALTF

SEQ ID NO: 790744 - protein, 14 aa, Homo sapiens
  CDR3 for beta chain variable domain of TCR clone 395372 (TRBV25-1, TRBJ1-1)
CASTHLGGNTEAFF

SEQ ID NO: 790745 - protein, 13 aa, Homo sapiens
  CDR3 for alpha chain variable domain of TCR clone 395373 (TRAV30, TRAJ34)
CGTVGYNTDNLIF

SEQ ID NO: 790746 - protein, 16 aa, Homo sapiens
  CDR3 for beta chain variable domain of TCR clone 395373 (TRBV7-9, TRBJ1-2)
RASSLGFSSGEDGYTF

SEQ ID NO: 790747 - protein, 16 aa, Homo sapiens
  CDR3 for alpha chain variable domain of TCR clone 395374 (TRAV26-1, TRAJ58)
IASSESGETSRSRLTF

SEQ ID NO: 790748 - protein, 14 aa, Homo sapiens
  CDR3 for beta chain variable domain of TCR clone 395374 (TRBV9, TRBJ2-1)
CASSVDPRGKEQFF

SEQ ID NO: 790749 - protein, 14 aa, Homo sapiens
  CDR3 for alpha chain variable domain of TCR clone 395375 (TRAV1-2, TRAJ8)
CAVREDTGFQKLVF

SEQ ID NO: 790750 - protein, 15 aa, Homo sapiens
  CDR3 for beta chain variable domain of TCR clone 395375 (TRBV15, TRBJ1-1)
CATSLQGGRNTEAVF

SEQ ID NO: 790751 - protein, 14 aa, Homo sapiens
  CDR3 for alpha chain variable domain of TCR clone 395376 (TRAV12-3, TRAJ29)
CAMSPYSGNTPLVF

SEQ ID NO: 790752 - protein, 16 aa, Homo sapiens
  CDR3 for beta chain variable domain of TCR clone 395376 (TRBV6-1, TRBJ2-5)
CASSETLDRGAETQYF

SEQ ID NO: 790753 - protein, 16 aa, Homo sapiens
  CDR3 for alpha chain variable domain of TCR clone 395377 (TRAV21, TRAJ35)
CAVMPIGFGNVLHGVF

SEQ ID NO: 790754 - protein, 12 aa, Homo sapiens
  CDR3 for beta chain variable domain of TCR clone 395377 (TRBV7-9, TRBJ2-7)
CASSIKREEQYF

SEQ ID NO: 790755 - protein, 15 aa, Homo sapiens
  CDR3 for alpha chain variable domain of TCR clone 395378 (TRAV21, TRAJ38)
CAVRQDAGNNRKLIW

SEQ ID NO: 790756 - protein, 15 aa, Homo sapiens
  CDR3 for beta chain variable domain of TCR clone 395378 (TRBV19, TRBJ2-7)
CASSPAGSGEALRYF

SEQ ID NO: 790757 - protein, 15 aa, Homo sapiens
  CDR3 for alpha chain variable domain of TCR clone 395379 (TRAV3, TRAJ22)
CAVRDRGGSARQLTF

SEQ ID NO: 790758 - protein, 16 aa, Homo sapiens
  CDR3 for beta chain variable domain of TCR clone 395379 (TRBV5-4, TRBJ2-3)
CASQQPGAGAADTQYF

SEQ ID NO: 790759 - protein, 15 aa, Homo sapiens
  CDR3 for alpha chain variable domain of TCR clone 395380 (TRAV3, TRAJ47)
CAVRDIGEYGNKLVF

SEQ ID NO: 790760 - protein, 15 aa, Homo sapiens
  CDR3 for beta chain variable domain of TCR clone 395380 (TRBV7-3, TRBJ2-2)
CASKANGANTGELFF

SEQ ID NO: 790761 - protein, 11 aa, Homo sapiens
  CDR3 for alpha chain variable domain of TCR clone 395381 (TRAV12-2, TRAJ31)
CAILNNPRLMF

SEQ ID NO: 790762 - protein, 16 aa, Homo sapiens
  CDR3 for beta chain variable domain of TCR clone 395381 (TRBV13, TRBJ2-2)
CASSPRTGEHTGELFF

SEQ ID NO: 790763 - protein, 21 aa, Homo sapiens
  CDR3 for alpha chain variable domain of TCR clone 395382 (TRAV25, TRAJ53)
TATQTTDVGTGSGGSNYKLTF

SEQ ID NO: 790764 - protein, 13 aa, Homo sapiens
  CDR3 for beta chain variable domain of TCR clone 395382 (TRBV10-2, TRBJ2-5)
CASGRLARETQYF

SEQ ID NO: 790765 - protein, 12 aa, Homo sapiens
  CDR3 for alpha chain variable domain of TCR clone 395383 (TRAV27, TRAJ36)
ASTPAGANNLFF

SEQ ID NO: 790766 - protein, 13 aa, Homo sapiens
  CDR3 for beta chain variable domain of TCR clone 395383 (TRBV4-1, TRBJ1-1)
CASSRKMNTEAFF

SEQ ID NO: 790767 - protein, 14 aa, Homo sapiens
  CDR3 for alpha chain variable domain of TCR clone 395384 (TRAV13-1, TRAJ26)
CAASSAHYGQNFVF

SEQ ID NO: 790768 - protein, 17 aa, Homo sapiens
  CDR3 for beta chain variable domain of TCR clone 395384 (TRBV25-1, TRBJ2-5)
RASSRRGGRGGQETQYF

SEQ ID NO: 790769 - protein, 12 aa, Homo sapiens
  CDR3 for alpha chain variable domain of TCR clone 395385 (TRAV12-3, TRAJ17)
CAVTPTGNKLTF

SEQ ID NO: 790770 - protein, 15 aa, Homo sapiens
  CDR3 for beta chain variable domain of TCR clone 395385 (TRBV20-1, TRBJ2-7)
CSARDRASGMDEQYF

SEQ ID NO: 790771 - protein, 16 aa, Homo sapiens
  CDR3 for alpha chain variable domain of TCR clone 395386 (TRAV38-2/DV8, TRAJ45)
CAYTTTSGGGADGLTF

SEQ ID NO: 790772 - protein, 14 aa, Homo sapiens
  CDR3 for beta chain variable domain of TCR clone 395386 (TRBV7-9, TRBJ2-5)
CASSLVGGEETQYF

SEQ ID NO: 790773 - protein, 17 aa, Homo sapiens
  CDR3 for alpha chain variable domain of TCR clone 395387 (TRAV27, TRAJ42)
CAERVIYHGVSQGNLIF

SEQ ID NO: 790774 - protein, 14 aa, Homo sapiens
  CDR3 for beta chain variable domain of TCR clone 395387 (TRBV6-6, TRBJ2-3)
CASRLQREADTQYF

SEQ ID NO: 790775 - protein, 13 aa, Homo sapiens
  CDR3 for alpha chain variable domain of TCR clone 395388 (TRAV3, TRAJ21)
CAVREPDFNKFYF

SEQ ID NO: 790776 - protein, 14 aa, Homo sapiens
  CDR3 for beta chain variable domain of TCR clone 395388 (TRBV19, TRBJ2-1)
CASPTFVLGGEQFF

SEQ ID NO: 790777 - protein, 16 aa, Homo sapiens
  CDR3 for alpha chain variable domain of TCR clone 395389 (TRAV17, TRAJ35)
CATAEGRIGFGNVLHC

SEQ ID NO: 790778 - protein, 16 aa, Homo sapiens
  CDR3 for beta chain variable domain of TCR clone 395389 (TRBV6-5, TRBJ2-7)
CASSSDPTSGFYEQYF

SEQ ID NO: 790779 - protein, 16 aa, Homo sapiens
  CDR3 for alpha chain variable domain of TCR clone 395390 (TRAV3, TRAJ10)
CAVRDMRAGGGNKLTF

SEQ ID NO: 790780 - protein, 17 aa, Homo sapiens
  CDR3 for beta chain variable domain of TCR clone 395390 (TRBV28, TRBJ2-5)
CASSTPEGDALQETQDF

SEQ ID NO: 790781 - protein, 17 aa, Homo sapiens
  CDR3 for alpha chain variable domain of TCR clone 395391 (TRAV38-2/DV8, TRAJ56)
CAYRSEVGTGANSKLTC

SEQ ID NO: 790782 - protein, 14 aa, Homo sapiens
  CDR3 for beta chain variable domain of TCR clone 395391 (TRBV11-1, TRBJ1-1)
CASSLEHPNTEAFF

SEQ ID NO: 790783 - protein, 14 aa, Homo sapiens
  CDR3 for alpha chain variable domain of TCR clone 395392 (TRAV8-2, TRAJ37)
CVVSGSGNTGKLIF

SEQ ID NO: 790784 - protein, 15 aa, Homo sapiens
  CDR3 for beta chain variable domain of TCR clone 395392 (TRBV18, TRBJ2-7)
CASSPTVTPNYEQYV

SEQ ID NO: 790785 - protein, 14 aa, Homo sapiens
  CDR3 for alpha chain variable domain of TCR clone 395393 (TRAV12-1, TRAJ8)
CVVNSNTGFQKLVF

SEQ ID NO: 790786 - protein, 16 aa, Homo sapiens
  CDR3 for beta chain variable domain of TCR clone 395393 (TRBV20-1, TRBJ2-2)
CSARDDRGGLTGELFF

SEQ ID NO: 790787 - protein, 15 aa, Homo sapiens
  CDR3 for alpha chain variable domain of TCR clone 395394 (TRAV38-1, TRAJ37)
CAFIFGSGNTGKPIF

SEQ ID NO: 790788 - protein, 14 aa, Homo sapiens
  CDR3 for beta chain variable domain of TCR clone 395394 (TRBV19, TRBJ2-1)
CASPTFVLSGEQFF

SEQ ID NO: 790789 - protein, 13 aa, Homo sapiens
  CDR3 for alpha chain variable domain of TCR clone 395395 (TRAV39, TRAJ58)
CAGEETIGSRLTF

SEQ ID NO: 790790 - protein, 13 aa, Homo sapiens
  CDR3 for beta chain variable domain of TCR clone 395395 (TRBV15, TRBJ2-7)
CATSTTGHYEQYF

SEQ ID NO: 790791 - protein, 14 aa, Homo sapiens
  CDR3 for alpha chain variable domain of TCR clone 395396 (TRAV23/DV6, TRAJ15)
CAASKYQAGTALIF

SEQ ID NO: 790792 - protein, 15 aa, Homo sapiens
  CDR3 for beta chain variable domain of TCR clone 395396 (TRBV19, TRBJ2-1)
CASSSPGVPLDEQFF

SEQ ID NO: 790793 - protein, 13 aa, Homo sapiens
  CDR3 for alpha chain variable domain of TCR clone 395397 (TRAV9-2, TRAJ53)
CALSGGSNYKLTF

SEQ ID NO: 790794 - protein, 17 aa, Homo sapiens
  CDR3 for beta chain variable domain of TCR clone 395397 (TRBV11-2, TRBJ2-1)
CASILYPPGVEYNEQFF

SEQ ID NO: 790795 - protein, 16 aa, Homo sapiens
  CDR3 for alpha chain variable domain of TCR clone 395398 (TRAV30, TRAJ24)
CGTEIVDADSWGKFQF

SEQ ID NO: 790796 - protein, 12 aa, Homo sapiens
  CDR3 for beta chain variable domain of TCR clone 395398 (TRBV11-2, TRBJ2-2)
CASSLGGGVLFF

SEQ ID NO: 790797 - protein, 16 aa, Homo sapiens
  CDR3 for alpha chain variable domain of TCR clone 395399 (TRAV20, TRAJ38)
CAVQASNAGNNRKLIW

SEQ ID NO: 790798 - protein, 16 aa, Homo sapiens
  CDR3 for beta chain variable domain of TCR clone 395399 (TRBV7-8, TRBJ2-6)
CAYRVGDSSGANVLTF

SEQ ID NO: 790799 - protein, 12 aa, Homo sapiens
  CDR3 for alpha chain variable domain of TCR clone 395400 (TRAV21, TRAJ29)
CAVTSGNTPLVC

SEQ ID NO: 790800 - protein, 15 aa, Homo sapiens
  CDR3 for beta chain variable domain of TCR clone 395400 (TRBV12-4, TRBJ1-2)
CASRLGVAGNYGYTF

SEQ ID NO: 790801 - protein, 13 aa, Homo sapiens
  CDR3 for alpha chain variable domain of TCR clone 395401 (TRAV35, TRAJ31)
CAGHQFNNARIMF

SEQ ID NO: 790802 - protein, 14 aa, Homo sapiens
  CDR3 for beta chain variable domain of TCR clone 395401 (TRBV12-4, TRBJ2-5)
CASSPWAGEETQYF

SEQ ID NO: 790803 - protein, 14 aa, Homo sapiens
  CDR3 for alpha chain variable domain of TCR clone 395402 (TRAV26-1, TRAJ38)
CIADNAGNNRKLIW

SEQ ID NO: 790804 - protein, 17 aa, Homo sapiens
  CDR3 for beta chain variable domain of TCR clone 395402 (TRBV11-2, TRBJ2-4)
CASSSVGPGGHRNIQYF

SEQ ID NO: 790805 - protein, 13 aa, Homo sapiens
  CDR3 for alpha chain variable domain of TCR clone 395403 (TRAV13-1, TRAJ21)
CAASIYNFNKFYF

SEQ ID NO: 790806 - protein, 15 aa, Homo sapiens
  CDR3 for beta chain variable domain of TCR clone 395403 (TRBV9, TRBJ2-1)
CASSLAGSAYNEQFF

SEQ ID NO: 790807 - protein, 15 aa, Homo sapiens
  CDR3 for alpha chain variable domain of TCR clone 395404 (TRAV8-3, TRAJ45)
CASSYSGGCSDGLTF

SEQ ID NO: 790808 - protein, 13 aa, Homo sapiens
  CDR3 for beta chain variable domain of TCR clone 395404 (TRBV10-3, TRBJ2-7)
CASKLAVNYEQYF

SEQ ID NO: 790809 - protein, 14 aa, Homo sapiens
  CDR3 for alpha chain variable domain of TCR clone 395405 (TRAV17, TRAJ33)
SATDARRSNYQLIW

SEQ ID NO: 790810 - protein, 14 aa, Homo sapiens
  CDR3 for beta chain variable domain of TCR clone 395405 (TRBV25-1, TRBJ1-4)
CASSGGGQPEKLFF

SEQ ID NO: 790811 - protein, 14 aa, Homo sapiens
  CDR3 for alpha chain variable domain of TCR clone 395406 (TRAV12-1, TRAJ30)
CVPTGTNRDDEIIF

SEQ ID NO: 790812 - protein, 11 aa, Homo sapiens
  CDR3 for beta chain variable domain of TCR clone 395406 (TRBV4-1, TRBJ2-2)
CASEHTGELFF

SEQ ID NO: 790813 - protein, 16 aa, Homo sapiens
  CDR3 for alpha chain variable domain of TCR clone 395407 (TRAV20, TRAJ22)
CAVQASSSGSARQLTF

SEQ ID NO: 790814 - protein, 13 aa, Homo sapiens
  CDR3 for beta chain variable domain of TCR clone 395407 (TRBV2, TRBJ1-1)
CASSVLMNTEAFF

SEQ ID NO: 790815 - protein, 14 aa, Homo sapiens
  CDR3 for alpha chain variable domain of TCR clone 395408 (TRAV12-1, TRAJ12)
CVVTSGDSSYKLIF

SEQ ID NO: 790816 - protein, 16 aa, Homo sapiens
  CDR3 for beta chain variable domain of TCR clone 395408 (TRBV29-1, TRBJ2-7)
CSVEVVGTSGSYEQYF

SEQ ID NO: 790817 - protein, 14 aa, Homo sapiens
  CDR3 for alpha chain variable domain of TCR clone 395409 (TRAV8-3, TRAJ9)
CAVVYYTGGFKTIF

SEQ ID NO: 790818 - protein, 15 aa, Homo sapiens
  CDR3 for beta chain variable domain of TCR clone 395409 (TRBV28, TRBJ2-5)
CASSPPWSYQETQYF

SEQ ID NO: 790819 - protein, 17 aa, Homo sapiens
  CDR3 for alpha chain variable domain of TCR clone 395410 (TRAV13-1, TRAJ28)
CAASPPYSGAGSYQLTF

SEQ ID NO: 790820 - protein, 15 aa, Homo sapiens
  CDR3 for beta chain variable domain of TCR clone 395410 (TRBV6-3, TRBJ2-2)
CGSSFLATLTGELFF

SEQ ID NO: 790821 - protein, 16 aa, Homo sapiens
  CDR3 for alpha chain variable domain of TCR clone 395411 (TRAV16, TRAJ4)
CALSRMFSGGYNKLIF

SEQ ID NO: 790822 - protein, 13 aa, Homo sapiens
  CDR3 for beta chain variable domain of TCR clone 395411 (TRBV15, TRBJ2-7)
CATSTTGHYEQYF

SEQ ID NO: 790823 - protein, 14 aa, Homo sapiens
  CDR3 for alpha chain variable domain of TCR clone 395412 (TRAV23/DV6, TRAJ22)
CAASVSGSARQLTF

SEQ ID NO: 790824 - protein, 16 aa, Homo sapiens
  CDR3 for beta chain variable domain of TCR clone 395412 (TRBV19, TRBJ2-2)
CASSFPGQGLAGELFF

SEQ ID NO: 790825 - protein, 16 aa, Homo sapiens
  CDR3 for alpha chain variable domain of TCR clone 395413 (TRAV30, TRAJ24)
CGTEIVDADSWGKFQF

SEQ ID NO: 790826 - protein, 17 aa, Homo sapiens
  CDR3 for beta chain variable domain of TCR clone 395413 (TRBV7-2, TRBJ2-7)
CASSPFGSSGASPEQYF

SEQ ID NO: 790827 - protein, 15 aa, Homo sapiens
  CDR3 for alpha chain variable domain of TCR clone 395414 (TRAV13-1, TRAJ17)
CSASIERAAGNKLTF

SEQ ID NO: 790828 - protein, 15 aa, Homo sapiens
  CDR3 for beta chain variable domain of TCR clone 395414 (TRBV7-9, TRBJ1-4)
CASSARTGGNEKLFF

SEQ ID NO: 790829 - protein, 13 aa, Homo sapiens
  CDR3 for alpha chain variable domain of TCR clone 395415 (TRAV17, TRAJ9)
CATDGTGGFNTIF

SEQ ID NO: 790830 - protein, 17 aa, Homo sapiens
  CDR3 for beta chain variable domain of TCR clone 395415 (TRBV6-5, TRBJ2-7)
CASSYSFWGQGSYEQYF

SEQ ID NO: 790831 - protein, 14 aa, Homo sapiens
  CDR3 for alpha chain variable domain of TCR clone 395416 (TRAV12-2, TRAJ45)
CAVNKGGGADGLTF

SEQ ID NO: 790832 - protein, 15 aa, Homo sapiens
  CDR3 for beta chain variable domain of TCR clone 395416 (TRBV9, TRBJ1-6)
FASSVAGTGDSPLHF

SEQ ID NO: 790833 - protein, 16 aa, Homo sapiens
  CDR3 for alpha chain variable domain of TCR clone 395417 (TRAV12-1, TRAJ43)
CVVNPHRFGAGTRLTA

SEQ ID NO: 790834 - protein, 13 aa, Homo sapiens
  CDR3 for beta chain variable domain of TCR clone 395417 (TRBV28, TRBJ2-2)
CASIGGLGGELFF

SEQ ID NO: 790835 - protein, 10 aa, Homo sapiens
  CDR3 for alpha chain variable domain of TCR clone 395418 (TRAV23/DV6, TRAJ57)
CAASPTLSQG

SEQ ID NO: 790836 - protein, 13 aa, Homo sapiens
  CDR3 for beta chain variable domain of TCR clone 395418 (TRBV15, TRBJ1-6)
CATSGGLNSPLHF

SEQ ID NO: 790837 - protein, 12 aa, Homo sapiens
  CDR3 for alpha chain variable domain of TCR clone 395419 (TRAV17, TRAJ54)
CATPQGAQKLVF

SEQ ID NO: 790838 - protein, 14 aa, Homo sapiens
  CDR3 for beta chain variable domain of TCR clone 395419 (TRBV12-4, TRBJ1-1)
CASSLGTGGTEAFF

SEQ ID NO: 790839 - protein, 14 aa, Homo sapiens
  CDR3 for alpha chain variable domain of TCR clone 395420 (TRAV17, TRAJ23)
CATASYNQGGKLIF

SEQ ID NO: 790840 - protein, 16 aa, Homo sapiens
  CDR3 for beta chain variable domain of TCR clone 395420 (TRBV12-4, TRBJ1-5)
CASSRPVGGSNQPQPF

SEQ ID NO: 790841 - protein, 15 aa, Homo sapiens
  CDR3 for alpha chain variable domain of TCR clone 395421 (TRAV29/DV5, TRAJ42)
CAAKTDGGSQGNHIF

SEQ ID NO: 790842 - protein, 12 aa, Homo sapiens
  CDR3 for beta chain variable domain of TCR clone 395421 (TRBV11-2, TRBJ2-1)
CASSPGNNEQFF

SEQ ID NO: 790843 - protein, 16 aa, Homo sapiens
  CDR3 for alpha chain variable domain of TCR clone 395422 (TRAV30, TRAJ24)
CGTEIVDADSWGKFQF

SEQ ID NO: 790844 - protein, 17 aa, Homo sapiens
  CDR3 for beta chain variable domain of TCR clone 395422 (TRBV3-1, TRBJ2-2)
CASSLRPPASGTGELFF

SEQ ID NO: 790845 - protein, 14 aa, Homo sapiens
  CDR3 for alpha chain variable domain of TCR clone 395423 (TRAV14/DV4, TRAJ15)
CAMRREQAGTALIF

SEQ ID NO: 790846 - protein, 16 aa, Homo sapiens
  CDR3 for beta chain variable domain of TCR clone 395423 (TRBV15, TRBJ2-3)
CATSRDLGIVTDTQYF

SEQ ID NO: 790847 - protein, 15 aa, Homo sapiens
  CDR3 for alpha chain variable domain of TCR clone 395424 (TRAV29/DV5, TRAJ40)
CAASAQGSGTYKYIF

SEQ ID NO: 790848 - protein, 15 aa, Homo sapiens
  CDR3 for beta chain variable domain of TCR clone 395424 (TRBV5-1, TRBJ2-5)
CASSFKGGDQETQYF

SEQ ID NO: 790849 - protein, 14 aa, Homo sapiens
  CDR3 for alpha chain variable domain of TCR clone 395425 (TRAV12-2, TRAJ24)
CAVTPADSWGKLQF

SEQ ID NO: 790850 - protein, 15 aa, Homo sapiens
  CDR3 for beta chain variable domain of TCR clone 395425 (TRBV7-2, TRBJ2-1)
CASSSGLAGGNEQFF

SEQ ID NO: 790851 - protein, 15 aa, Homo sapiens
  CDR3 for alpha chain variable domain of TCR clone 395426 (TRAV3, TRAJ22)
CAVRDRGGSARQLTF

SEQ ID NO: 790852 - protein, 15 aa, Homo sapiens
  CDR3 for beta chain variable domain of TCR clone 395426 (TRBV7-9, TRBJ2-2)
CASGPLDTFPGELFF

SEQ ID NO: 790853 - protein, 12 aa, Homo sapiens
  CDR3 for alpha chain variable domain of TCR clone 395427 (TRAV13-2, TRAJ37)
CAEKGNTGKLIF

SEQ ID NO: 790854 - protein, 15 aa, Homo sapiens
  CDR3 for beta chain variable domain of TCR clone 395427 (TRBV12-4, TRBJ2-5)
CASSPPTGLQETQYF

SEQ ID NO: 790855 - protein, 13 aa, Homo sapiens
  CDR3 for alpha chain variable domain of TCR clone 395428 (TRAV12-1, TRAJ21)
CVVTLYNFNKFYF

SEQ ID NO: 790856 - protein, 20 aa, Homo sapiens
  CDR3 for beta chain variable domain of TCR clone 395428 (TRBV7-8, TRBJ2-1)
CASSLAHRLAGGRSYNEQFF

SEQ ID NO: 790857 - protein, 14 aa, Homo sapiens
  CDR3 for alpha chain variable domain of TCR clone 395429 (TRAV3, TRAJ9)
CAVRLNTGGFKTIF

SEQ ID NO: 790858 - protein, 16 aa, Homo sapiens
  CDR3 for beta chain variable domain of TCR clone 395429 (TRBV12-5, TRBJ2-5)
CASGPRTIGNQETQYF

SEQ ID NO: 790859 - protein, 14 aa, Homo sapiens
  CDR3 for alpha chain variable domain of TCR clone 395430 (TRAV12-2, TRAJ5)
CAVNRSTGRRALTF

SEQ ID NO: 790860 - protein, 15 aa, Homo sapiens
  CDR3 for beta chain variable domain of TCR clone 395430 (TRBV7-9, TRBJ1-4)
CASSATGGNNEKLFF

SEQ ID NO: 790861 - protein, 14 aa, Homo sapiens
  CDR3 for alpha chain variable domain of TCR clone 395431 (TRAV21, TRAJ6)
CAVKWLVGSYIPTF

SEQ ID NO: 790862 - protein, 14 aa, Homo sapiens
  CDR3 for beta chain variable domain of TCR clone 395431 (TRBV25-1, TRBJ1-1)
CASTHLGGNTEAFF

SEQ ID NO: 790863 - protein, 15 aa, Homo sapiens
  CDR3 for alpha chain variable domain of TCR clone 395432 (TRAV23/DV6, TRAJ18)
CAARYRGSTLGRLYF

SEQ ID NO: 790864 - protein, 20 aa, Homo sapiens
  CDR3 for beta chain variable domain of TCR clone 395432 (TRBV28, TRBJ2-1)
CASTPIGRSPGLAGGNEQFF

SEQ ID NO: 790865 - protein, 13 aa, Homo sapiens
  CDR3 for alpha chain variable domain of TCR clone 395433 (TRAV2, TRAJ29)
CAAQNSGNTPLVF

SEQ ID NO: 790866 - protein, 14 aa, Homo sapiens
  CDR3 for beta chain variable domain of TCR clone 395433 (TRBV7-9, TRBJ2-4)
CASSLAMGGNIQCF

SEQ ID NO: 790867 - protein, 16 aa, Homo sapiens
  CDR3 for alpha chain variable domain of TCR clone 395434 (TRAV12-2, TRAJ18)
CAVTTDRGSTLGRLYF

SEQ ID NO: 790868 - protein, 14 aa, Homo sapiens
  CDR3 for beta chain variable domain of TCR clone 395434 (TRBV4-2, TRBJ1-5)
CASSQDSIKQTQHF

SEQ ID NO: 790869 - protein, 16 aa, Homo sapiens
  CDR3 for alpha chain variable domain of TCR clone 395435 (TRAV12-1, TRAJ8)
CVVNGRGNTGFQKLVF

SEQ ID NO: 790870 - protein, 15 aa, Homo sapiens
  CDR3 for beta chain variable domain of TCR clone 395435 (TRBV28, TRBJ2-7)
CASKKPSGRAYEQYF

SEQ ID NO: 790871 - protein, 14 aa, Homo sapiens
  CDR3 for alpha chain variable domain of TCR clone 395436 (TRAV26-1, TRAJ39)
CIVRGSSAGNILTF

SEQ ID NO: 790872 - protein, 15 aa, Homo sapiens
  CDR3 for beta chain variable domain of TCR clone 395436 (TRBV7-9, TRBJ1-5)
CASSQGHQPNQPQHF

SEQ ID NO: 790873 - protein, 14 aa, Homo sapiens
  CDR3 for alpha chain variable domain of TCR clone 395437 (TRAV38-1, TRAJ45)
CAYYSGGGDDGLTF

SEQ ID NO: 790874 - protein, 20 aa, Homo sapiens
  CDR3 for beta chain variable domain of TCR clone 395437 (TRBV28, TRBJ2-1)
WASTPIGRSPGLAGGNEQFF

SEQ ID NO: 790875 - protein, 10 aa, Homo sapiens
  CDR3 for alpha chain variable domain of TCR clone 395438 (TRAV1-2, TRAJ31)
CAFFDARLMF

SEQ ID NO: 790876 - protein, 16 aa, Homo sapiens
  CDR3 for beta chain variable domain of TCR clone 395438 (TRBV15, TRBJ1-2)
CHLRREIDVVNYGYTF

SEQ ID NO: 790877 - protein, 12 aa, Homo sapiens
  CDR3 for alpha chain variable domain of TCR clone 395439 (TRAV1-2, TRAJ29)
CAVPSGSTPLVF

SEQ ID NO: 790878 - protein, 12 aa, Homo sapiens
  CDR3 for beta chain variable domain of TCR clone 395439 (TRBV12-4, TRBJ2-7)
CASSLGGYEQYF

SEQ ID NO: 790879 - protein, 12 aa, Homo sapiens
  CDR3 for alpha chain variable domain of TCR clone 395440 (TRAV21, TRAJ33)
CAVQDSNYQLIW

SEQ ID NO: 790880 - protein, 13 aa, Homo sapiens
  CDR3 for beta chain variable domain of TCR clone 395440 (TRBV15, TRBJ1-6)
CATSGGLNSPLHF

SEQ ID NO: 790881 - protein, 12 aa, Homo sapiens
  CDR3 for alpha chain variable domain of TCR clone 395441 (TRAV30, TRAJ39)
CGRGNAGNMLTF

SEQ ID NO: 790882 - protein, 14 aa, Homo sapiens
  CDR3 for beta chain variable domain of TCR clone 395441 (TRBV7-9, TRBJ2-5)
CASSLAPDQETQYF

SEQ ID NO: 790883 - protein, 16 aa, Homo sapiens
  CDR3 for alpha chain variable domain of TCR clone 395442 (TRAV8-2, TRAJ7)
CVVSEGPYYGNNRLAF

SEQ ID NO: 790884 - protein, 15 aa, Homo sapiens
  CDR3 for beta chain variable domain of TCR clone 395442 (TRBV27, TRBJ2-3)
CASSLGLAATDTHYF

SEQ ID NO: 790885 - protein, 15 aa, Homo sapiens
  CDR3 for alpha chain variable domain of TCR clone 395443 (TRAV16, TRAJ4)
CSSRMFSGGYNKLIF

SEQ ID NO: 790886 - protein, 14 aa, Homo sapiens
  CDR3 for beta chain variable domain of TCR clone 395443 (TRBV4-1, TRBJ2-2)
CASSQAVNTGELFF

SEQ ID NO: 790887 - protein, 12 aa, Homo sapiens
  CDR3 for alpha chain variable domain of TCR clone 395444 (TRAV13-1, TRAJ21)
CAAKEGFNKFYF

SEQ ID NO: 790888 - protein, 14 aa, Homo sapiens
  CDR3 for beta chain variable domain of TCR clone 395444 (TRBV6-5, TRBJ1-5)
CASSPMDGGQPQHF

SEQ ID NO: 790889 - protein, 13 aa, Homo sapiens
  CDR3 for alpha chain variable domain of TCR clone 395445 (TRAV36/DV7, TRAJ37)
CAVFSSNTGKLIS

SEQ ID NO: 790890 - protein, 15 aa, Homo sapiens
  CDR3 for beta chain variable domain of TCR clone 395445 (TRBV12-4, TRBJ2-5)
CQQFFVRGRQETQYF

SEQ ID NO: 790891 - protein, 16 aa, Homo sapiens
  CDR3 for alpha chain variable domain of TCR clone 395446 (TRAV30, TRAJ24)
CGTEIVDADSRGKFQF

SEQ ID NO: 790892 - protein, 14 aa, Homo sapiens
  CDR3 for beta chain variable domain of TCR clone 395446 (TRBV12-5, TRBJ2-5)
CASGLRTHQETQYF

SEQ ID NO: 790893 - protein, 14 aa, Homo sapiens
  CDR3 for alpha chain variable domain of TCR clone 395447 (TRAV1-2, TRAJ16)
CAVNRFSDGQKLLC

SEQ ID NO: 790894 - protein, 15 aa, Homo sapiens
  CDR3 for beta chain variable domain of TCR clone 395447 (TRBV20-1, TRBJ1-1)
CSASRGVTGNTEAFF

SEQ ID NO: 790895 - protein, 15 aa, Homo sapiens
  CDR3 for alpha chain variable domain of TCR clone 395448 (TRAV13-2, TRAJ4)
CADPQERGGYNKLIF

SEQ ID NO: 790896 - protein, 13 aa, Homo sapiens
  CDR3 for beta chain variable domain of TCR clone 395448 (TRBV7-7, TRBJ2-5)
CASSRSGQETQYF

SEQ ID NO: 790897 - protein, 18 aa, Homo sapiens
  CDR3 for alpha chain variable domain of TCR clone 395449 (TRAV13-1, TRAJ52)
CAASKRSAGGTSYGKLSF

SEQ ID NO: 790898 - protein, 13 aa, Homo sapiens
  CDR3 for beta chain variable domain of TCR clone 395449 (TRBV12-4, TRBJ1-2)
CASSLRQGKGYAF

SEQ ID NO: 790899 - protein, 17 aa, Homo sapiens
  CDR3 for alpha chain variable domain of TCR clone 395450 (TRAV3, TRAJ6)
FAVRDGPRAVGSYIPTF

SEQ ID NO: 790900 - protein, 14 aa, Homo sapiens
  CDR3 for beta chain variable domain of TCR clone 395450 (TRBV7-2, TRBJ2-7)
CASSPKTSFYEQYF

SEQ ID NO: 790901 - protein, 12 aa, Homo sapiens
  CDR3 for alpha chain variable domain of TCR clone 395451 (TRAV13-1, TRAJ43)
CAAGRFNNDMRF

SEQ ID NO: 790902 - protein, 13 aa, Homo sapiens
  CDR3 for beta chain variable domain of TCR clone 395451 (TRBV28, TRBJ2-5)
CASSFAGGETQYF

SEQ ID NO: 790903 - protein, 16 aa, Homo sapiens
  CDR3 for alpha chain variable domain of TCR clone 395452 (TRAV16, TRAJ57)
FAPYLITQGGSEKLFF

SEQ ID NO: 790904 - protein, 17 aa, Homo sapiens
  CDR3 for beta chain variable domain of TCR clone 395452 (TRBV24-1, TRBJ2-4)
CATSDAEARGVRNIQYF

SEQ ID NO: 790905 - protein, 13 aa, Homo sapiens
  CDR3 for alpha chain variable domain of TCR clone 395453 (TRAV17, TRAJ9)
CGTDYTGGFKTIF

SEQ ID NO: 790906 - protein, 19 aa, Homo sapiens
  CDR3 for beta chain variable domain of TCR clone 395453 (TRBV25-1, TRBJ2-2)
CAILVYRVDRGRKTGELFF

SEQ ID NO: 790907 - protein, 14 aa, Homo sapiens
  CDR3 for alpha chain variable domain of TCR clone 395454 (TRAV1-2, TRAJ16)
CAVNRFSDGQKLLF

SEQ ID NO: 790908 - protein, 15 aa, Homo sapiens
  CDR3 for beta chain variable domain of TCR clone 395454 (TRBV9, TRBJ1-6)
CASSVAGTGGSTLHF

SEQ ID NO: 790909 - protein, 15 aa, Homo sapiens
  CDR3 for alpha chain variable domain of TCR clone 395455 (TRAV2, TRAJ22)
CAVPSRGGSARQLPF

SEQ ID NO: 790910 - protein, 13 aa, Homo sapiens
  CDR3 for beta chain variable domain of TCR clone 395455 (TRBV12-5, TRBJ2-3)
CASGDRQSDTQYF

SEQ ID NO: 790911 - protein, 16 aa, Homo sapiens
  CDR3 for alpha chain variable domain of TCR clone 395456 (TRAV23/DV6, TRAJ9)
CAASIGGNTGGVKTIF

SEQ ID NO: 790912 - protein, 14 aa, Homo sapiens
  CDR3 for beta chain variable domain of TCR clone 395456 (TRBV9, TRBJ2-7)
CASSVGVGSYEQYF

SEQ ID NO: 790913 - protein, 22 aa, Homo sapiens
  CDR3 for alpha chain variable domain of TCR clone 395457 (TRAV27, TRAJ41)
CAVRTQIPDIQNPDPAGYQLRD

SEQ ID NO: 790914 - protein, 16 aa, Homo sapiens
  CDR3 for beta chain variable domain of TCR clone 395457 (TRBV5-1, TRBJ2-3)
CASSWGLAVYTDTQYF

SEQ ID NO: 790915 - protein, 14 aa, Homo sapiens
  CDR3 for alpha chain variable domain of TCR clone 395458 (TRAV1-2, TRAJ16)
CAVNRVSDGQKLLF

SEQ ID NO: 790916 - protein, 16 aa, Homo sapiens
  CDR3 for beta chain variable domain of TCR clone 395458 (TRBV27, TRBJ1-5)
CASSLVDREDNQPQHF

SEQ ID NO: 790917 - protein, 16 aa, Homo sapiens
  CDR3 for alpha chain variable domain of TCR clone 395459 (TRAV1-2, TRAJ10)
CAERGVLTGGGNKPTF

SEQ ID NO: 790918 - protein, 12 aa, Homo sapiens
  CDR3 for beta chain variable domain of TCR clone 395459 (TRBV7-8, TRBJ2-7)
CASSLGDREQYF

SEQ ID NO: 790919 - protein, 14 aa, Homo sapiens
  CDR3 for alpha chain variable domain of TCR clone 395460 (TRAV8-4, TRAJ54)
CAVSEVLGAQKLVF

SEQ ID NO: 790920 - protein, 15 aa, Homo sapiens
  CDR3 for beta chain variable domain of TCR clone 395460 (TRBV4-1, TRBJ1-4)
CASSDTGGTNEKLFF

SEQ ID NO: 790921 - protein, 14 aa, Homo sapiens
  CDR3 for alpha chain variable domain of TCR clone 395461 (TRAV8-3, TRAJ4)
CAVGAAGDYDKLIF

SEQ ID NO: 790922 - protein, 15 aa, Homo sapiens
  CDR3 for beta chain variable domain of TCR clone 395461 (TRBV6-5, TRBJ2-1)
CASSYDAGAGNEQFF

SEQ ID NO: 790923 - protein, 14 aa, Homo sapiens
  CDR3 for alpha chain variable domain of TCR clone 395462 (TRAV12-2, TRAJ5)
CAVNRSKGRRALTF

SEQ ID NO: 790924 - protein, 12 aa, Homo sapiens
  CDR3 for beta chain variable domain of TCR clone 395462 (TRBV19, TRBJ1-5)
CASSIAQQPQHF

SEQ ID NO: 790925 - protein, 12 aa, Homo sapiens
  CDR3 for alpha chain variable domain of TCR clone 395463 (TRAV26-1, TRAJ26)
CIVYNYGQNFVF

SEQ ID NO: 790926 - protein, 15 aa, Homo sapiens
  CDR3 for beta chain variable domain of TCR clone 395463 (TRBV7-2, TRBJ2-3)
CANSLRGGSTDTQYF

SEQ ID NO: 790927 - protein, 13 aa, Homo sapiens
  CDR3 for alpha chain variable domain of TCR clone 395464 (TRAV12-1, TRAJ16)
CVVNGPDGQKLLF

SEQ ID NO: 790928 - protein, 12 aa, Homo sapiens
  CDR3 for beta chain variable domain of TCR clone 395464 (TRBV7-9, TRBJ1-5)
CASSPQGQPQHF

SEQ ID NO: 790929 - protein, 16 aa, Homo sapiens
  CDR3 for alpha chain variable domain of TCR clone 395465 (TRAV12-3, TRAJ53)
CAMSPGSGGSNYKLTF

SEQ ID NO: 790930 - protein, 17 aa, Homo sapiens
  CDR3 for beta chain variable domain of TCR clone 395465 (TRBV7-9, TRBJ2-6)
CASSFGAGYSGANVLTF

SEQ ID NO: 790931 - protein, 15 aa, Homo sapiens
  CDR3 for alpha chain variable domain of TCR clone 395466 (TRAV26-1, TRAJ44)
CIVRIGTGTASKLTF

SEQ ID NO: 790932 - protein, 15 aa, Homo sapiens
  CDR3 for beta chain variable domain of TCR clone 395466 (TRBV7-6, TRBJ2-1)
CAISSLAGEGNEQFF

SEQ ID NO: 790933 - protein, 15 aa, Homo sapiens
  CDR3 for alpha chain variable domain of TCR clone 395467 (TRAV8-3, TRAJ45)
CALSYSGGGADVLTF

SEQ ID NO: 790934 - protein, 13 aa, Homo sapiens
  CDR3 for beta chain variable domain of TCR clone 395467 (TRBV10-3, TRBJ2-7)
CASKVAVRWEQLF

SEQ ID NO: 790935 - protein, 16 aa, Homo sapiens
  CDR3 for alpha chain variable domain of TCR clone 395468 (TRAV3, TRAJ21)
CAVRDIERGNFNKFYF

SEQ ID NO: 790936 - protein, 12 aa, Homo sapiens
  CDR3 for beta chain variable domain of TCR clone 395468 (TRBV27, TRBJ2-5)
CASSLKGETQYF

SEQ ID NO: 790937 - protein, 17 aa, Homo sapiens
  CDR3 for alpha chain variable domain of TCR clone 395469 (TRAV13-1, TRAJ52)
CAASSGAGGTSYGRLTF

SEQ ID NO: 790938 - protein, 15 aa, Homo sapiens
  CDR3 for beta chain variable domain of TCR clone 395469 (TRBV7-2, TRBJ2-1)
CASSSGLAGGNEQFF

SEQ ID NO: 790939 - protein, 13 aa, Homo sapiens
  CDR3 for alpha chain variable domain of TCR clone 395470 (TRAV12-3, TRAJ7)
CAMSASRNNRLAF

SEQ ID NO: 790940 - protein, 14 aa, Homo sapiens
  CDR3 for beta chain variable domain of TCR clone 395470 (TRBV13, TRBJ2-5)
CASSLGPRGETQYF

SEQ ID NO: 790941 - protein, 92 aa, Homo sapiens
  TRAV12-3
QKEVEQDPGPLSVPEGAIVSLNCTYSNSAFQYFMWYRQYSRKGPELLMYTYSSGNKEDGRFTAQVDKSSKYISLFIRDSQPSDSATYLCAMS

SEQ ID NO: 790942 - protein, 91 aa, Homo sapiens
  TRAV30
QQPVQSPQAVILREGEDAVINCSSSKALYSVHWYRQKHGEAPVFLMILLKGGEQKGHEKISASFNEKKQQSSLYLTASQLSYSGTYFCGTE

SEQ ID NO: 790943 - protein, 87 aa, Homo sapiens
  TRAV2
KDQVFQPSTVASSEGAVVEIFCNHSVSNAYNFFWYLHFPGCAPRLLVKGSKPSQQGRYNMTYERFSSSLLILQVREADAAVYYCAVE

SEQ ID NO: 790944 - protein, 95 aa, Homo sapiens
  TRAV3
AQSVAQPEDQVNVAEGNPLTVKCTYSVSGNPYLFWYVQYPNRGLQFLLKYITGDNLVKGSYGFEAEFNKSQTSFHLKKPSALVSDSALYFCAVRD

SEQ ID NO: 790945 - protein, 92 aa, Homo sapiens
  TRAV12-2
QKEVEQNSGPLSVPEGAIASLNCTYSDRGSQSFFWYRQYSGKSPELIMFIYSNGDKEDGRFTAQLNKASQYVSLLIRDSQPSDSATYLCAVN

SEQ ID NO: 790946 - protein, 93 aa, Homo sapiens
  TRAV21
KQEVTQIPAALSVPEGENLVLNCSFTDSAIYNLQWFRQDPGKGLTSLLLIQSSQREQTSGRLNASLDKSSGRSTLYIAASQPGDSATYLCAVR

SEQ ID NO: 790947 - protein, 93 aa, Homo sapiens
  TRAV13-1
GENVEQHPSTLSVQEGDSAVIKCTYSDSASNYFPWYKQELGKGPQLIIDIRSNVGEKKDQRIAVTLNKTAKHFSLHITETQPEDSAVYFCAAS

SEQ ID NO: 790948 - protein, 91 aa, Homo sapiens
  TRAV1-2
GQNIDQPTEMTATEGAIVQINCTYQTSGFNGLFWYQQHAGEAPTFLSYNVLDGLEEKGRFSSFLSRSKGYSYLLLKELQMKDSASYLCAVR

SEQ ID NO: 790949 - protein, 94 aa, Homo sapiens
  TRAV8-3
AQSVTQPDIHITVSEGASLELRCNYSYGATPYLFWYVQSPGQGLQLLLKYFSGDTLVQGIKGFEAEFKRSQSSFNLRKPSVHWSDAAEYFCAVG

SEQ ID NO: 790950 - protein, 92 aa, Homo sapiens
  TRAV26-1
DAKTTQPPSMDCAEGRAANLPCNHSTISGNEYVYWYRQIHSQGPQYIIHGLKNNETNEMASLIITEDRKSSTLILPHATLRDTAVYYCIVRV

SEQ ID NO: 790951 - protein, 91 aa, Homo sapiens
  TRAV1-1
GQSLEQPSEVTAVEGAIVQINCTYQTSGFYGLSWYQQHDGGAPTFLSYNALDGLEETGRFSSFLSRSDSYGYLLLQELQMKDSASYFCAVR

SEQ ID NO: 790952 - protein, 91 aa, Homo sapiens
  TRAV27
TQLLEQSPQFLSIQEGENLTVYCNSSSVFSSLQWYRQEPGEGPVLLVTVVTGGEVKKLKRLTFQFGDARKDSSLHITAAQPGDTGLYLCAG

SEQ ID NO: 790953 - protein, 91 aa, Homo sapiens
  TRAV12-1
RKEVEQDPGPFNVPEGATVAFNCTYSNSASQSFFWYRQDCRKEPKLLMSVYSSGNEDGRFTAQLNRASQYISLLIRDSKLSDSATYLCVVN

SEQ ID NO: 790954 - protein, 92 aa, Homo sapiens
  TRAV35
GQQLNQSPQSMFIQEGEDVSMNCTSSSIFNTWLWYKQEPGEGPVLLIALYKAGELTSNGRLTAQFGITRKDSFLNISASIPSDVGIYFCAGQ

SEQ ID NO: 790955 - protein, 91 aa, Homo sapiens
  TRAV20
EDQVTQSPEALRLQEGESSSLNCSYTVSGLRGLFWYRQDPGKGPEFLFTLYSAGEEKEKERLKATLTKKESFLHITAPKPEDSATYLCAVQ

SEQ ID NO: 790956 - protein, 93 aa, Homo sapiens
  TRAV23/DV6
QQQVKQSPQSLIVQKGGISIINCAYENTAFDYFPWYQQFPGKGPALLIAIRPDVSEKKEGRFTISFNKSAKQFSLHIMDSQPGDSATYFCAAS

SEQ ID NO: 790957 - protein, 92 aa, Homo sapiens
  TRAV17
SQQGEEDPQALSIQEGENATMNCSYKTSINNLQWYRQNSGRGLVHLILIRSNEREKHSGRLRVTLDTSKKSSSLLITASRAADTASYFCATD

SEQ ID NO: 790958 - protein, 96 aa, Homo sapiens
  TRAV38-1
AQTVTQSQPEMSVQEAETVTLSCTYDTSENNYYLFWYKQPPSRQMILVIRQEAYKQQNATENRFSVNFQKAAKSFSLKISDSQLGDTAMYFCAFMK

SEQ ID NO: 790959 - protein, 93 aa, Homo sapiens
  TRAV13-2
GESVGLHLPTLSVQEGDNSIINCAYSNSASDYFIWYKQESGKGPQFIIDIRSNMDKRQGQRVTVLLNKTVKHLSLQIAATQPGDSAVYFCAEN

SEQ ID NO: 790960 - protein, 91 aa, Homo sapiens
  TRAV25
GQQVMQIPQYQHVQEGEDFTTYCNSSTTLSNIQWYKQRPGGHPVFLIQLVKSGEVKKQKRLTFQFGEAKKNSSLHITATQTTDVGTYFCAG

SEQ ID NO: 790961 - protein, 90 aa, Homo sapiens
  TRAV16
AQRVTQPEKLLSVFKGAPVELKCNYSYSGSPELFWYVQYSRQRLQLLLRHISRESIKGFTADLNKGETSFHLKKPFAQEEDSAMYYCALS

SEQ ID NO: 790962 - protein, 94 aa, Homo sapiens
  TRAV8-2
AQSVTQLDSHVSVSEGTPVLLRCNYSSSYSPSLFWYVQHPNKGLQLLLKYTSAATLVKGINGFEAEFKKSETSFHLTKPSAHMSDAAEYFCVVS

SEQ ID NO: 790963 - protein, 92 aa, Homo sapiens
  TRAV4
LAKTTQPISMDSYEGQEVNITCSHNNIATNDYITWYQQFPSQGPRFIIQGYKTKVTNEVASLFIPADRKSSTLSLPRVSLSDTAVYYCLVGD

SEQ ID NO: 790964 - protein, 94 aa, Homo sapiens
  TRAV8-6
AQSVTQLDSQVPVFEEAPVELRCNYSSSVSVYLFWYVQYPNQGLQLLLKYLSGSTLVESINGFEAEFNKSQTSFHLRKPSVHISDTAEYFCAVS

SEQ ID NO: 790965 - protein, 92 aa, Homo sapiens
  TRAV26-2
DAKTTQPNSMESNEEEPVHLPCNHSTISGTDYIHWYRQLPSQGPEYVIHGLTSNVNNRMASLAIAEDRKSSTLILHRATLRDAAVYYCILRD

SEQ ID NO: 790966 - protein, 92 aa, Homo sapiens
  TRAV36/DV7
EDKVVQSPLSLVVHEGDTVTLNCSYEVTNFRSLLWYKQEKKAPTFLFMLTSSGIEKKSGRLSSILDKKELSSILNITATQTGDSAIYLCAVE

SEQ ID NO: 790967 - protein, 93 aa, Homo sapiens
  TRAV29/DV5
DQQVKQNSPSLSVQEGRISILNCDYTNSMFDYFLWYKKYPAEGPTFLISISSIKDKNEDGRFTVFLNKSAKHLSLHIVPSQPGDSAVYFCAAS

SEQ ID NO: 790968 - protein, 94 aa, Homo sapiens
  TRAV8-4
AQSVTQLGSHVSVSEGALVLLRCNYSSSVPPYLFWYVQYPNQGLQLLLKYTSAATLVKGINGFEAEFKKSETSFHLTKPSAHMSDAAEYFCAVS

SEQ ID NO: 790969 - protein, 92 aa, Homo sapiens
  TRAV34
SQELEQSPQSLIVQEGKNLTINCTSSKTLYGLYWYKQKYGEGLIFLMMLQKGGEEKSHEKITAKLDEKKQQSSLHITASQPSHAGIYLCGAD

SEQ ID NO: 790970 - protein, 90 aa, Homo sapiens
  TRAV22
GIQVEQSPPDLILQEGANSTLRCNFSDSVNNLQWFHQNPWGQLINLFYIPSGTKQNGRLSATTVATERYSLLYISSSQTTDSGVYFCAVE

SEQ ID NO: 790971 - protein, 93 aa, Homo sapiens
  TRAV9-2
GNSVTQMEGPVTLSEEAFLTINCTYTATGYPSLFWYVQYPGEGLQLLLKATKADDKGSNKGFEATYRKETTSFHLEKGSVQVSDSAVYFCALS

SEQ ID NO: 790972 - protein, 92 aa, Homo sapiens
  TRAV39
ELKVEQNPLFLSMQEGKNYTIYCNYSTTSDRLYWYRQDPGKSLESLFVLLSNGAVKQEGRLMASLDTKARLSTLHITAAVHDLSATYFCAVD

SEQ ID NO: 790973 - protein, 96 aa, Homo sapiens
  TRAV38-2/DV8
AQTVTQSQPEMSVQEAETVTLSCTYDTSESDYYLFWYKQPPSRQMILVIRQEAYKQQNATENRFSVNFQKAAKSFSLKISDSQLGDAAMYFCAYRS

SEQ ID NO: 790974 - protein, 92 aa, Homo sapiens
  TRAV5
GEDVEQSLFLSVREGDSSVINCTYTDSSSTYLYWYKQEPGAGLQLLTYIFSNMDMKQDQRLTVLLNKKDKHLSLRIADTQTGDSAIYFCAES

SEQ ID NO: 790975 - protein, 94 aa, Homo sapiens
  TRAV8-1
AQSVSQHNHHVILSEAASLELGCNYSYGGTVNLFWYVQYPGQHLQLLLKYFSGDPLVKGIKGFEAEFIKSKFSFNLRKPSVQWSDTAEYFCAVN

SEQ ID NO: 790976 - protein, 93 aa, Homo sapiens
  TRAV10
KNQVEQSPQSLIILEGKNCTLQCNYTVSPFSNLRWYKQDTGRGPVSLTIMTFSENTKSNGRYTATLDADTKQSSLHITASQLSDSASYICVVS

SEQ ID NO: 790977 - protein, 96 aa, Homo sapiens
  TRAV14/DV4
AQKITQTQPGMFVQEKEAVTLDCTYDTSDPSYGLFWYKQPSSGEMIFLIYQGSYDQQNATEGRYSLNFQKARKSANLVISASQLGDSAMYFCAMRE

SEQ ID NO: 790978 - protein, 87 aa, Homo sapiens
  TRAV40
SNSVKQTGQITVSEGASVTMNCTYTSTGYPTLFWYVEYPSKPLQLLQRETMENSKNFGGGNIKDKNSPIVKYSVQVSDSAVYYCLLG

SEQ ID NO: 790979 - protein, 93 aa, Homo sapiens
  TRAV6
SQKIEQNSEALNIQEGKTATLTCNYTNYSPAYLQWYRQDPGRGPVFLLLIRENEKEKRKERLKVTFDTTLKQSLFHITASQPADSATYLCALD

SEQ ID NO: 790980 - protein, 90 aa, Homo sapiens
  TRAV41
KNEVEQSPQNLTAQEGEFITINCSYSVGISALHWLQQHPGGGIVSLFMLSSGKKKHGRLIATINIQEKHSSLHITASHPRDSAVYICAVR

SEQ ID NO: 790981 - protein, 92 aa, Homo sapiens
  TRAV24
ILNVEQSPQSLHVQEGDSTNFTCSFPSSNFYALHWYRWETAKSPEALFVMTLNGDEKKKGRISATLNTKEGYSYLYIKGSQPEDSATYLCAF

SEQ ID NO: 790982 - protein, 96 aa, Homo sapiens
  TRAV19
AQKVTQAQTEISVVEKEDVTLDCVYETRDTTYYLFWYKQPPSGELVFLIRRNSFDEQNEISGRYSWNFQKSTSSFNFTITASQVVDSAVYFCALSE

SEQ ID NO: 790983 - protein, 92 aa, Homo sapiens
  TRAV18
GDSVTQTEGPVTLPERAALTLNCTYQSSYSTFLFWYVQYLNKEPELLLKSSENQETDSRGFQASPIKSDSSFHLEKPSVQLSDSAVYYCALR

SEQ ID NO: 790984 - protein, 20 aa, Homo sapiens
  TRAJ17
IKAAGNKLTFGGGTRVLVKP

SEQ ID NO: 790985 - protein, 20 aa, Homo sapiens
  TRAJ24
TTDSWGKFEFGAGTQVVVTP

SEQ ID NO: 790986 - protein, 20 aa, Homo sapiens
  TRAJ40
TTSGTYKYIFGTGTRLKVLA

SEQ ID NO: 790987 - protein, 20 aa, Homo sapiens
  TRAJ6
ASGGSYIPTFGRGTSLIVHP

SEQ ID NO: 790988 - protein, 18 aa, Homo sapiens
  TRAJ21
YNFNKFYFGSGTKLNVKP

SEQ ID NO: 790989 - protein, 20 aa, Homo sapiens
  TRAJ13
NSGGYQKVTFGIGTKLQVIP

SEQ ID NO: 790990 - protein, 19 aa, Homo sapiens
  TRAJ27
NTNAGKSTFGDGTTLTVKP

SEQ ID NO: 790991 - protein, 22 aa, Homo sapiens
  TRAJ52
NAGGTSYGKLTFGQGTILTVHP

SEQ ID NO: 790992 - protein, 21 aa, Homo sapiens
  TRAJ53
NSGGSNYKLTFGKGTLLTVNP

SEQ ID NO: 790993 - protein, 19 aa, Homo sapiens
  TRAJ35
IGFGNVLHCGSGTQVIVLP

SEQ ID NO: 790994 - protein, 19 aa, Homo sapiens
  TRAJ8
NTGFQKLVFGTGTRLLVSP

SEQ ID NO: 790995 - protein, 21 aa, Homo sapiens
  TRAJ45
YSGGGADGLTFGKGTHLIIQP

SEQ ID NO: 790996 - protein, 19 aa, Homo sapiens
  TRAJ29
NSGNTPLVFGKGTRLSVIA

SEQ ID NO: 790997 - protein, 19 aa, Homo sapiens
  TRAJ16
FSDGQKLLFARGTMLKVDL

SEQ ID NO: 790998 - protein, 20 aa, Homo sapiens
  TRAJ9
GNTGGFKTIFGAGTRLFVKA

SEQ ID NO: 790999 - protein, 20 aa, Homo sapiens
  TRAJ23
IYNQGGKLIFGQGTELSVKP

SEQ ID NO: 791000 - protein, 20 aa, Homo sapiens
  TRAJ38
NAGNNRKLIWGLGTSLAVNP

SEQ ID NO: 791001 - protein, 20 aa, Homo sapiens
  TRAJ37
GSGNTGKLIFGQGTTLQVKP

SEQ ID NO: 791002 - protein, 18 aa, Homo sapiens
  TRAJ20
SNDYKLSFGAGTTVTVRA

SEQ ID NO: 791003 - protein, 19 aa, Homo sapiens
  TRAJ5
DTGRRALTFGSGTRLQVQP

SEQ ID NO: 791004 - protein, 20 aa, Homo sapiens
  TRAJ57
TQGGSEKLVFGKGTKLTVNP

SEQ ID NO: 791005 - protein, 20 aa, Homo sapiens
  TRAJ22
SSGSARQLTFGSGTQLTVLP

SEQ ID NO: 791006 - protein, 18 aa, Homo sapiens
  TRAJ33
DSNYQLIWGAGTKLIIKP

SEQ ID NO: 791007 - protein, 21 aa, Homo sapiens
  TRAJ10
ILTGGGNKLTFGTGTQLKVEL

SEQ ID NO: 791008 - protein, 20 aa, Homo sapiens
  TRAJ48
SNFGNEKLTFGTGTRLTIIP

SEQ ID NO: 791009 - protein, 18 aa, Homo sapiens
  TRAJ31
NNNARLMFGDGTQLVVKP

SEQ ID NO: 791010 - protein, 21 aa, Homo sapiens
  TRAJ28
YSGAGSYQLTFGKGTKLSVIP

SEQ ID NO: 791011 - protein, 17 aa, Homo sapiens
  TRAJ43
NNNDMRFGAGTRLTVKP

SEQ ID NO: 791012 - protein, 20 aa, Homo sapiens
  TRAJ56
YTGANSKLTFGKGITLSVRP

SEQ ID NO: 791013 - protein, 20 aa, Homo sapiens
  TRAJ39
NNNAGNMLTFGGGTRLMVKP

SEQ ID NO: 791014 - protein, 19 aa, Homo sapiens
  TRAJ11
NSGYSTLTFGKGTMLLVSP

SEQ ID NO: 791015 - protein, 20 aa, Homo sapiens
  TRAJ4
FSGGYNKLIFGAGTRLAVHP

SEQ ID NO: 791016 - protein, 19 aa, Homo sapiens
  TRAJ12
MDSSYKLIFGSGTRLLVRP

SEQ ID NO: 791017 - protein, 20 aa, Homo sapiens
  TRAJ41
NSNSGYALNFGKGTSLLVTP

SEQ ID NO: 791018 - protein, 18 aa, Homo sapiens
  TRAJ49
NTGNQFYFGTGTSLTVIP

SEQ ID NO: 791019 - protein, 21 aa, Homo sapiens
  TRAJ42
NYGGSQGNLIFGKGTKLSVKP

SEQ ID NO: 791020 - protein, 19 aa, Homo sapiens
  TRAJ36
QTGANNLFFGTGTRLTVIP

SEQ ID NO: 791021 - protein, 20 aa, Homo sapiens
  TRAJ3
GYSSASKIIFGSGTRLSIRP

SEQ ID NO: 791022 - protein, 20 aa, Homo sapiens
  TRAJ44
NTGTASKLTFGTGTRLQVTL

SEQ ID NO: 791023 - protein, 19 aa, Homo sapiens
  TRAJ34
SYNTDKLIFGTGTRLQVFP

SEQ ID NO: 791024 - protein, 19 aa, Homo sapiens
  TRAJ15
NQAGTALIFGKGTTLSVSS

SEQ ID NO: 791025 - protein, 19 aa, Homo sapiens
  TRAJ58
ETSGSRLTFGEGTQLTVNP

SEQ ID NO: 791026 - protein, 19 aa, Homo sapiens
  TRAJ54
IQGAQKLVFGQGTRLTINP

SEQ ID NO: 791027 - protein, 19 aa, Homo sapiens
  TRAJ26
DNYGQNFVFGPGTRLSVLP

SEQ ID NO: 791028 - protein, 21 aa, Homo sapiens
  TRAJ18
DRGSTLGRLYFGRGTQLTVWP

SEQ ID NO: 791029 - protein, 18 aa, Homo sapiens
  TRAJ30
NRDDKIIFGKGTRLHILP

SEQ ID NO: 791030 - protein, 18 aa, Homo sapiens
  TRAJ47
EYGNKLVFGAGTILRVKS

SEQ ID NO: 791031 - protein, 19 aa, Homo sapiens
  TRAJ50
KTSYDKVIFGPGTSLSVIP

SEQ ID NO: 791032 - protein, 19 aa, Homo sapiens
  TRAJ7
DYGNNRLAFGKGNQVVVIP

SEQ ID NO: 791033 - protein, 21 aa, Homo sapiens
  TRAJ32
NYGGATNKLIFGTGTLLAVQP

SEQ ID NO: 791034 - protein, 20 aa, Homo sapiens
  TRAJ46
KKSSGDKLTFGTGTRLAVRP

SEQ ID NO: 791035 - protein, 19 aa, Homo sapiens
  TRAJ61
YRVNRKLTFGANTRGIMKL

SEQ ID NO: 791036 - protein, 97 aa, Homo sapiens
  TRBV20-1
GAVVSQHPSWVICKSGTSVKIECRSLDFQATTMFWYRQFPKQSLMLMATSNEGSKATYEQGVEKDKFLINHASLTLSTLTVTSAHPEDSSFYICSAR

SEQ ID NO: 791037 - protein, 96 aa, Homo sapiens
  TRBV12-5
DARVTQTPRHKVTEMGQEVTMRCQPILGHNTVFWYRQTMMQGLELLAYFRNRAPLDDSGMPKDRFSAEMPDATLATLKIQPSEPRDSAVYFCASGL

SEQ ID NO: 791038 - protein, 95 aa, Homo sapiens
  TRBV19
DGGITQSPKYLFRKEGQNVTLSCEQNLNHDAMYWYRQDPGQGLRLIYYSQIVNDFQKGDIAEGYSVSREKKESFPLTVTSAQKNPTAFYLCASSI

SEQ ID NO: 791039 - protein, 96 aa, Homo sapiens
  TRBV7-2
GAGVSQSPSNKVTEKGKDVELRCDPISGHTALYWYRQSLGQGLEFLIYFQGNSAPDKSGLPSDRFSAERTGGSVSTLTIQRTQQEDSAVYLCASSL

SEQ ID NO: 791040 - protein, 95 aa, Homo sapiens
  TRBV27
EAQVTQNPRYLITVTGKKLTVTCSQNMNHEYMSWYRQDPGLGLRQIYYSMNVEVTDKGDVPEGYKVSRKEKRNFPLILESPSPNQTSLYFCASSL

SEQ ID NO: 791041 - protein, 96 aa, Homo sapiens
  TRBV7-6
GAGVSQSPRYKVTKRGQDVALRCDPISGHVSLYWYRQALGQGPEFLTYFNYEAQQDKSGLPNDRFSAERPEGSISTLTIQRTEQRDSAMYRCASSL

SEQ ID NO: 791042 - protein, 95 aa, Homo sapiens
  TRBV13
AAGVIQSPRHLIKEKRETATLKCYPIPRHDTVYWYQQGPGQDPQFLISFYEKMQSDKGSIPDRFSAQQFSDYHSELNMSSLELGDSALYFCASSL

SEQ ID NO: 791043 - protein, 96 aa, Homo sapiens
  TRBV29-1
SAVISQKPSRDICQRGTSLTIQCQVDSQVTMMFWYRQQPGQSLTLIATANQGSEATYESGFVIDKFPISRPNLTFSTLTVSNMSPEDSSIYLCSVE

SEQ ID NO: 791044 - protein, 96 aa, Homo sapiens
  TRBV7-3
GAGVSQTPSNKVTEKGKYVELRCDPISGHTALYWYRQSLGQGPEFLIYFQGTGAADDSGLPNDRFFAVRPEGSVSTLKIQRTERGDSAVYLCASSL

SEQ ID NO: 791045 - protein, 95 aa, Homo sapiens
  TRBV6-3
NAGVTQTPKFRVLKTGQSMTLLCAQDMNHEYMYWYRQDPGMGLRLIHYSVGEGTTAKGEVPDGYNVSRLKKQNFLLGLESAAPSQTSVYFCASSY

SEQ ID NO: 791046 - protein, 95 aa, Homo sapiens
  TRBV10-3
DAGITQSPRHKVTETGTPVTLRCHQTENHRYMYWYRQDPGHGLRLIHYSYGVKDTDKGEVSDGYSVSRSKTEDFLLTLESATSSQTSVYFCAISE

SEQ ID NO: 791047 - protein, 96 aa, Homo sapiens
  TRBV7-9
DTGVSQNPRHKITKRGQNVTFRCDPISEHNRLYWYRQTLGQGPEFLTYFQNEAQLEKSRLLSDRFSAERPKGSFSTLEIQRTEQGDSAMYLCASSL

SEQ ID NO: 791048 - protein, 95 aa, Homo sapiens
  TRBV9
DSGVTQTPKHLITATGQRVTLRCSPRSGDLSVYWYQQSLDQGLQFLIQYYNGEERAKGNILERFSAQQFPDLHSELNLSSLELGDSALYFCASSV

SEQ ID NO: 791049 - protein, 96 aa, Homo sapiens
  TRBV7-8
GAGVSQSPRYKVAKRGQDVALRCDPISGHVSLFWYQQALGQGPEFLTYFQNEAQLDKSGLPSDRFFAERPEGSVSTLKIQRTQQEDSAVYLCASSL

SEQ ID NO: 791050 - protein, 96 aa, Homo sapiens
  TRBV12-4
DAGVIQSPRHEVTEMGQEVTLRCKPISGHDYLFWYRQTMMRGLELLIYFNNNVPIDDSGMPEDRFSAKMPNASFSTLKIQPSEPRDSAVYFCASSL

SEQ ID NO: 791051 - protein, 96 aa, Homo sapiens
  TRBV18
NAGVMQNPRHLVRRRGQEARLRCSPMKGHSHVYWYRQLPEEGLKFMVYLQKENIIDESGMPKERFSAEFPKEGPSILRIQQVVRGDSAAYFCASSP

SEQ ID NO: 791052 - protein, 96 aa, Homo sapiens
  TRBV11-2
EAGVAQSPRYKIIEKRQSVAFWCNPISGHATLYWYQQILGQGPKLLIQFQNNGVVDDSQLPKDRFSAERLKGVDSTLKIQPAKLEDSAVYLCASSL

SEQ ID NO: 791053 - protein, 95 aa, Homo sapiens
  TRBV6-1
NAGVTQTPKFQVLKTGQSMTLQCAQDMNHNSMYWYRQDPGMGLRLIYYSASEGTTDKGEVPNGYNVSRLNKREFSLRLESAAPSQTSVYFCASSE

SEQ ID NO: 791054 - protein, 95 aa, Homo sapiens
  TRBV25-1
EADIYQTPRYLVIGTGKKITLECSQTMGHDKMYWYQQDPGMELHLIHYSYGVNSTEKGDLSSESTVSRIRTEHFPLTLESARPSHTSQYLCASSE

SEQ ID NO: 791055 - protein, 96 aa, Homo sapiens
  TRBV11-3
EAGVVQSPRYKIIEKKQPVAFWCNPISGHNTLYWYLQNLGQGPELLIRYENEEAVDDSQLPKDRFSAERLKGVDSTLKIQPAELGDSAVYLCASSL

SEQ ID NO: 791056 - protein, 96 aa, Homo sapiens
  TRBV2
EPEVTQTPSHQVTQMGQEVILRCVPISNHLYFYWYRQILGQKVEFLVSFYNNEISEKSEIFDDQFSVERPDGSNFTLKIRSTKLEDSAMYFCASSE

SEQ ID NO: 791057 - protein, 95 aa, Homo sapiens
  TRBV28
DVKVTQSSRYLVKRTGEKVFLECVQDMDHENMFWYRQDPGLGLRLIYFSYDVKMKEKGDIPEGYSVSREKKERFSLILESASTNQTSMYLCASSL

SEQ ID NO: 791058 - protein, 96 aa, Homo sapiens
  TRBV24-1
DADVTQTPRNRITKTGKRIMLECSQTKGHDRMYWYRQDPGLGLRLIYYSFDVKDINKGEISDGYSVSRQAQAKFSLSLESAIPNQTALYFCATSDL

SEQ ID NO: 791059 - protein, 95 aa, Homo sapiens
  TRBV6-5
NAGVTQTPKFQVLKTGQSMTLQCAQDMNHEYMSWYRQDPGMGLRLIHYSVGAGITDQGEVPNGYNVSRSTTEDFPLRLLSAAPSQTSVYFCASSY

SEQ ID NO: 791060 - protein, 95 aa, Homo sapiens
  TRBV6-6
NAGVTQTPKFRILKIGQSMTLQCTQDMNHNYMYWYRQDPGMGLKLIYYSVGAGITDKGEVPNGYNVSRSTTEDFPLRLELAAPSQTSVYFCASSY

SEQ ID NO: 791061 - protein, 95 aa, Homo sapiens
  TRBV4-1
DTEVTQTPKHLVMGMTNKKSLKCEQHMGHRAMYWYKQKAKKPPELMFVYSYEKLSINESVPSRFSPECPNSSLLNLHLHALQPEDSALYLCASSQ

SEQ ID NO: 791062 - protein, 96 aa, Homo sapiens
  TRBV7-7
GAGVSQSPRYKVTKRGQDVTLRCDPISSHATLYWYQQALGQGPEFLTYFNYEAQPDKSGLPSDRFSAERPEGSISTLTIQRTEQRDSAMYRCASSL

SEQ ID NO: 791063 - protein, 95 aa, Homo sapiens
  TRBV5-4
ETGVTQSPTHLIKTRGQQVTLRCSSQSGHNTVSWYQQALGQGPQFIFQYYREEENGRGNFPPRFSGLQFPNYSSELNVNALELDDSALYLCASSL

SEQ ID NO: 791064 - protein, 95 aa, Homo sapiens
  TRBV10-2
DAGITQSPRYKITETGRQVTLMCHQTWSHSYMFWYRQDLGHGLRLIYYSAAADITDKGEVPDGYVVSRSKTENFPLTLESATRSQTSVYFCASSE

SEQ ID NO: 791065 - protein, 95 aa, Homo sapiens
  TRBV4-2
ETGVTQTPRHLVMGMTNKKSLKCEQHLGHNAMYWYKQSAKKPLELMFVYNFKEQTENNSVPSRFSPECPNSSHLFLHLHTLQPEDSALYLCASSQ

SEQ ID NO: 791066 - protein, 96 aa, Homo sapiens
  TRBV14
EAGVTQFPSHSVIEKGQTVTLRCDPISGHDNLYWYRRVMGKEIKFLLHFVKESKQDESGMPNNRFLAERTGGTYSTLKVQPAELEDSGVYFCASSQ

SEQ ID NO: 791067 - protein, 95 aa, Homo sapiens
  TRBV15
DAMVIQNPRYQVTQFGKPVTLSCSQTLNHNVMYWYQQKSSQAPKLLFHYYDKDFNNEADTPDNFQSRRPNTSFCFLDIRSPGLGDTAMYLCATSR

SEQ ID NO: 791068 - protein, 95 aa, Homo sapiens
  TRBV5-1
KAGVTQTPRYLIKTRGQQVTLSCSPISGHRSVSWYQQTPGQGLQFLFEYFSETQRNKGNFPGRFSGRQFSNSRSEMNVSTLELGDSALYLCASSL

SEQ ID NO: 791069 - protein, 96 aa, Homo sapiens
  TRBV11-1
EAEVAQSPRYKITEKSQAVAFWCDPISGHATLYWYRQILGQGPELLVQFQDESVVDDSQLPKDRFSAERLKGVDSTLKIQPAELGDSAMYLCASSL

SEQ ID NO: 791070 - protein, 95 aa, Homo sapiens
  TRBV3-1
DTAVSQTPKYLVTQMGNDKSIKCEQNLGHDTMYWYKQDSKKFLKIMFSYNNKELIINETVPNRFSPKSPDKAHLNLHINSLELGDSAVYFCASSQ

SEQ ID NO: 791071 - protein, 95 aa, Homo sapiens
  TRBV5-5
DAGVTQSPTHLIKTRGQQVTLRCSPISGHKSVSWYQQVLGQGPQFIFQYYEKEERGRGNFPDRFSARQFPNYSSELNVNALLLGDSALYLCASSL

SEQ ID NO: 791072 - protein, 95 aa, Homo sapiens
  TRBV5-7
DAGVTQSPTHLIKTRGQHVTLRCSPISGHTSVSSYQQALGQGPQFIFQYYEKEERGRGNFPDQFSGHQFPNYSSELNVNALLLGDSALYLCASSL

SEQ ID NO: 791073 - protein, 95 aa, Homo sapiens
  TRBV6-4
IAGITQAPTSQILAAGRRMTLRCTQDMRHNAMYWYRQDLGLGLRLIHYSNTAGTTGKGEVPDGYSVSRANTDDFPLTLASAVPSQTSVYFCASSD

SEQ ID NO: 791074 - protein, 95 aa, Homo sapiens
  TRBV4-3
ETGVTQTPRHLVMGMTNKKSLKCEQHLGHNAMYWYKQSAKKPLELMFVYSLEERVENNSVPSRFSPECPNSSHLFLHLHTLQPEDSALYLCASSQ

SEQ ID NO: 791075 - protein, 96 aa, Homo sapiens
  TRBV23-1
HAKVTQTPGHLVKGKGQKTKMDCTPEKGHTFVYWYQQNQNKEFMLLISFQNEQVLQETEMHKKRFSSQCPKNAPCSLAILSSEPGDTALYLCASSQ

SEQ ID NO: 791076 - protein, 95 aa, Homo sapiens
  TRBV5-8
EAGVTQSPTHLIKTRGQQATLRCSPISGHTSVYWYQQALGLGLQFLLWYDEGEERNRGNFPPRFSGRQFPNYSSELNVNALELEDSALYLCASSL

SEQ ID NO: 791077 - protein, 95 aa, Homo sapiens
  TRBV10-1
DAEITQSPRHKITETGRQVTLACHQTWNHNNMFWYRQDLGHGLRLIHYSYGVQDTNKGEVSDGYSVSRSNTEDLPLTLESAASSQTSVYFCASSE

SEQ ID NO: 791078 - protein, 96 aa, Homo sapiens
  TRBV16
GEEVAQTPKHLVRGEGQKAKLYCAPIKGHSYVFWYQQVLKNEFKFLISFQNENVFDETGMPKERFSAKCLPNSPCSLEIQATKLEDSAVYFCASSQ

SEQ ID NO: 791079 - protein, 95 aa, Homo sapiens
  TRBV5-3
EAGVTQSPTHLIKTRGQQVTLRCSPISGHSSVSWYQQAPGQGPQFIFEYANELRRSEGNFPNRFSGRQFHDCCSEMNVSALELGDSALYLCARSL

SEQ ID NO: 791080 - protein, 95 aa, Homo sapiens
  TRBV5-6
DAGVTQSPTHLIKTRGQQVTLRCSPKSGHDTVSWYQQALGQGPQFIFQYYEEEERQRGNFPDRFSGHQFPNYSSELNVNALLLGDSALYLCASSL

SEQ ID NO: 791081 - protein, 95 aa, Homo sapiens
  TRBV6-9
NAGVTQTPKFHILKTGQSMTLQCAQDMNHGYLSWYRQDPGMGLRRIHYSVAAGITDKGEVPDGYNVSRSNTEDFPLRLESAAPSQTSVYFCASSY

SEQ ID NO: 791082 - protein, 95 aa, Homo sapiens
  TRBV6-7
NAGVTQTPKFHVLKTGQSMTLLCAQDMNHEYMYRYRQDPGKGLRLIYYSVAAALTDKGEVPNGYNVSRSNTEDFPLKLESAAPSQTSVYFCASSY

SEQ ID NO: 791083 - protein, 96 aa, Homo sapiens
  TRBV7-4
GAGVSQSPRYKVAKRGRDVALRCDSISGHVTLYWYRQTLGQGSEVLTYSQSDAQRDKSGRPSGRFSAERPERSVSTLKIQRTEQGDSAVYLCASSL

SEQ ID NO: 791084 - protein, 96 aa, Homo sapiens
  TRBV12-3
DAGVIQSPRHEVTEMGQEVTLRCKPISGHNSLFWYRQTMMRGLELLIYFNNNVPIDDSGMPEDRFSAKMPNASFSTLKIQPSEPRDSAVYFCASSL

SEQ ID NO: 791085 - protein, 94 aa, Homo sapiens
  TRBV30
SQTIHQWPATLVQPVGSPLSLECTVEGTSNPNLYWYRQAAGRGLQLLFYSVGIGQISSEVPQNLSASRPQDRQFILSSKKLLLSDSGFYLCAWS

SEQ ID NO: 791086 - protein, 96 aa, Homo sapiens
  TRBV7-1
GAGVSQSLRHKVAKKGKDVALRYDPISGHNALYWYRQSLGQGLEFPIYFQGKDAADKSGLPRDRFSAQRSEGSISTLKFQRTQQGDLAVYLCASSS

SEQ ID NO: 791087 - protein, 15 aa, Homo sapiens
  TRBJ2-7
SYEQYFGPGTRLTVT

SEQ ID NO: 791088 - protein, 15 aa, Homo sapiens
  TRBJ2-5
QETQYFGPGTRLLVL

SEQ ID NO: 791089 - protein, 16 aa, Homo sapiens
  TRBJ2-1
SYNEQFFGPGTRLTVL

SEQ ID NO: 791090 - protein, 16 aa, Homo sapiens
  TRBJ2-3
STDTQYFGPGTRLTVL

SEQ ID NO: 791091 - protein, 15 aa, Homo sapiens
  TRBJ1-1
NTEAFFGQGTRLTVV

SEQ ID NO: 791092 - protein, 16 aa, Homo sapiens
  TRBJ1-5
SNQPQHFGDGTRLSIL

SEQ ID NO: 791093 - protein, 17 aa, Homo sapiens
  TRBJ1-6
SYNSPLHFGNGTRLTVT

SEQ ID NO: 791094 - protein, 15 aa, Homo sapiens
  TRBJ1-2
NYGYTFGSGTRLTVV

SEQ ID NO: 791095 - protein, 16 aa, Homo sapiens
  TRBJ2-2
NTGELFFGEGSRLTVL

SEQ ID NO: 791096 - protein, 17 aa, Homo sapiens
  TRBJ2-6
SGANVLTFGAGSRLTVL

SEQ ID NO: 791097 - protein, 16 aa, Homo sapiens
  TRBJ1-4
TNEKLFFGSGTQLSVL

SEQ ID NO: 791098 - protein, 16 aa, Homo sapiens
  TRBJ1-3
SGNTIYFGEGSWLTVV

SEQ ID NO: 791099 - protein, 16 aa, Homo sapiens
  TRBJ2-4
AKNIQYFGAGTRLSVL

SEQ ID NO: 791100 - protein, 19 aa, Homo sapiens
  TRAJ59
KEGNRKFTFGMGTQVRVKL

SEQ ID NO: 791101 - protein, 9 aa, Homo sapiens
  HLA_A 0201 gp100 peptide
KTWGQYWQV
